(19) United States
(12) Patent Application Publication
(10) Pub. No.: US 2013/0130231 A1
(43) Pub. Date: May 23, 2013

(54) Bioinformatically detectable group of novel viral regulatory genes and uses thereof

(71) Applicant: Isaac Bentwich, Kvuzat Shiler (IL)

(72) Inventor: Isaac Bentwich, Kvuzat Shiler (IL)

(21) Appl. No.: 10/303,778

(22) Filed: Nov. 26, 2002

(51) Int. Cl. C12N 15/113; C07H 21/02; C12Q 1/70

(52) U.S. Cl. CPC C12N 15/1131; C12Q 1/701; C07H 21/02
USPC 435/5; 536/24.5; 435/320.1; 435/375; 536/24.32; 536/24.1

(57) ABSTRACT

The present invention relates to a group of novel viral RNA regulatory genes, here identified as “viral genomic address messenger genes” or “VGAM genes”, and as “genomic address genes” or “GR” genes. VGAM genes selectively inhibit translation of known host target genes, and are believed to represent a novel pervasive viral attack mechanism. GR genes encode an operon-like cluster of VGAM genes. VGAM and viral GR genes may therefore be useful in diagnosing, preventing and treating viral disease. Several nucleic acid molecules are provided respectively encoding several VGAM genes, as are vectors and probes both comprising the nucleic acid molecules, and methods and systems for detecting VGAM genes, and for counteracting their activity.

### FIELD OF THE INVENTION

[0001] The present invention relates to a group of bioinformatically detectable novel viral RNA regulatory genes, here identified as “viral genomic address messenger” or “VGAM” genes.

### BACKGROUND OF THE INVENTION

[0002] Small RNAs are known to perform diverse cellular functions, including post-transcriptional gene expression regulation. The first two such RNA genes, Lin-4 and Let-7, were identified by genetic analysis of Caenorhabditis Elegans (Elegans) developmental timing, and were termed short temporal RNA (stRNA) (Wightman, B., Ha, I., Ruvkun, G., Cell 75, 855 (1993); Erdmann, V. A. et al., Nucleic Acids Res. 29, 189 (2001); Lee, R. C., Feinbaum, R. L., Ambros, V., Cell 75, 843 (1993); Reinhart, B. et al., Nature 403, 901 (2000)).

[0003] Lin-4 and Let-7 each transcribe a ˜22 nucleotide (nt) RNA, which acts a post transcriptional repressor of target mRNAs, by binding to elements in the 3′-untranslated region (UTR) of these target mRNAs, which are complimentary to the 22 nt sequence of Lin-4 and Let-7 respectively. While Lin-4 and Let-7 are expressed at different developmental stage, first larval stage and fourth larval stage respectively, both specify the temporal progression of cell fates, by triggering post-transcriptional control over other genes (Wightman, B., Ha, I., Ruvkun, G., Cell 75, 855 (1993); Slack et al., Mol. Cell 5, 659 (2000)). Let-7 as well as its temporal regulation have been demonstrated to be conserved in all major groups of bilaterally symmetrical animals, from nematodes, through flies to humans (Pasquinelli, A., et al. Nature 408, 86 (2000)).

[0004] The initial transcription product of Lin-4 and Let-7 is a ˜60-80 nt RNA, the nucleotide sequence of the first half of which is partially complimentary to that of its second half, therefore allowing this RNA to fold onto itself, forming a ‘hairpin structure’. The final gene product is a ˜22 nt RNA, which is ‘diced’ from the above mentioned ‘hairpin structure’, by an enzyme called Dicer, which also apparently also mediates the complimentary binding of this ˜22 nt segment to a binding site in the 3′ UTR of its target gene.

[0005] Recent studies have uncovered 93 new genes in this class, now referred to as micro RNA or miRNA genes, in genomes of Elegans, Drosophilea, and Human (Lagos-Quintana, M., Rauhut, R., Lendeckel, W., Tuschl, T., Science 294, 853 (2001); Lau, N. C., Lim, L. P., Weinstein, E. G., Bartel, D. P., Science 294, 858 (2001); Lee, R. C., Ambros, V., Science 294, 862 (2001). Like the well studied Lin-4 and Let-7, all newly found MIR genes produce a ˜60-80 nt RNA having a nucleotide sequence capable of forming a ‘hairpin structure’. Expressions of the precursor ˜60-80 nt RNA and of the resulting diced ˜22 nt RNA of most of these newly discovered MIR genes have been detected.

[0006] Based on the striking homology of the newly discovered MIR genes to their well-studied predecessors Lin-4 and Let-7, the new MIR genes are believed to have a similar basic function as that of Lin-4 and Let-7: modulation of target genes by complimentary binding to the UTR of these target genes, with special emphasis on modulation of developmental control processes. This is despite the fact that the above-mentioned recent studies did not find target genes to which the newly discovered MIR genes complementarily bind. While existing evidence suggests that the number of regulatory RNA genes “may turn out to be very large, numbering in the hundreds or even thousands in each genome”, detecting such genes is challenging (Ruvkun G., ‘Perspective: Glimpses of a tiny RNA world’, Science 294, 779 (2001)).

[0007] The ability to detect novel RNA genes is limited by the methodologies used to detect such genes. All RNA genes identified so far either present a visibly discernable whole body phenotype, as do Lin-4 and Let-7 (Wightman et. al., Cell 75, 855 (1993); Reinhart et al., Nature 403, 901 (2000)), or produce significant enough quantities of RNA so as to be detected by the standard biochemical genomic techniques, as do the 93 recently detected miRNA genes. Since a limited number clones were sequenced by the researchers discovering these genes, 300 by Bartel and 100 by Tuschl (Bartel et. al., Science 294, 858 (2001); Tuschl et. al., Science 294, 853 (2001)), the RNA genes found can not be much rarer than 1% of all RNA genes. The recently detected miRNA genes therefore represent the more prevalent among the miRNA gene family.

[0008] Current methodology has therefore been unable to detect RNA genes which either do not present a visually discernable whole body phenotype, or are rare (e.g. rarer than 0.1% of all RNA genes), and therefore do not produce significant enough quantities of RNA so as to be detected by standard biochemical technique.

[0009] To date, miRNA have not been detected in viruses.

### SUMMARY OF THE INVENTION

[0010] The present invention relates to a novel group of bioinformatically detectable, viral regulatory RNA genes, which repress expression of host target host genes, by means of complementary hybridization to binding sites in untranslated regions of these host target host genes. It is believed that this novel group of viral genes represent a pervasive viral mechanism of attacking hosts, and that therefore knowledge of this novel group of viral genes may be useful in preventing and treating viral diseases.

[0011] In various preferred embodiments, the present invention seeks to provide improved method and system for detection and prevention of viral disease, which is mediated by this group of novel viral genes.

[0012] Accordingly, the invention provides several substantially pure nucleic acids (e.g., genomic nucleic acid, cDNA or synthetic nucleic acid) each encoding a novel viral gene of the VGAM group of gene, vectors comprising the nucleic acids, probes comprising the nucleic acids, a method and system for selectively modulating translation of known ‘target’ genes utilizing the vectors, and a method and system for detecting expression of known ‘target’ genes utilizing the probe.

[0013] By “substantially pure nucleic acid” is meant nucleic acid that is free of the genes which, in the naturally-occurring genome of the organism from which the nucleic acid of the invention is derived, flank the genes discovered and isolated by the present invention. The term therefore includes, for example, a recombinant nucleic acid which is incorporated into a vector, into an autonomously replicating plasmid or virus, or into the genomic nucleic acid of a prokaryote or eukaryote at a site other than its natural site; or which exists as a separate molecule (e.g., a cDNA or a genomic or cDNA fragment produced by PCR or restriction endonuclease digestion) independent of other sequences. It also includes a recombinant nucleic acid which is part of a hybrid gene encoding additional polypeptide sequence.

[0014] “Inhibiting translation” is defined as the ability to prevent synthesis of a specific protein encoded by a respective gene, by means of inhibiting the translation of the mRNA of this gene. “Translation inhibiter site” is defined as the minimal nucleic acid sequence sufficient to inhibit translation.

[0015] There is thus provided in accordance with a preferred embodiment of the present invention a bioinformatically detectable novel viral gene encoding substantially pure nucleic acid wherein: RNA encoded by the bioinformatically detectable novel viral gene is about 18 to about 24 nucleotides in length, and originates from an RNA precursor, which RNA precursor is about 50 to about 120 nucleotides in length, a nucleotide sequence of a first half of the RNA precursor is a partial inversed-reversed sequence of a nucleotide sequence of a second half thereof, a nucleotide sequence of the RNA encoded by the novel viral gene is a partial inversed-reversed sequence of a nucleotide sequence of a binding site associated with at least one host target gene, and a function of the novel viral gene is bioinformatically deducible.

[0016] There is further provided in accordance with another preferred embodiment of the present invention a method for anti-viral treatment comprising neutralizing said RNA.

[0017] Further in accordance with a preferred embodiment of the present invention the neutralizing comprises: synthesizing a complementary nucleic acid molecule, a nucleic sequence of which complementary nucleic acid molecule is a partial inversed-reversed sequence of said RNA, and transfecting host cells with the complementary nucleic acid molecule, thereby complementarily binding said RNA.

[0018] Further in accordance with a preferred embodiment of the present invention the neutralizing comprises immunologically neutralizing.

[0019] There is still further provided in accordance with another preferred embodiment of the present invention a bioinformatically detectable novel viral gene encoding substantially pure nucleic acid wherein: RNA encoded by the bioninformatically detectable novel viral gene includes a plurality of RNA sections, each of the RNA sections being about 50 to about 120 nucleotides in length, and including an RNA segment, which RNA segment is about 18 to about 24 nucleotides in length, a nucleotide sequence of a first half of each of the RNA sections encoded by the novel viral gene is a partial inversed-reversed sequence of nucleotide sequence of a second half thereof, a nucleotide sequence of each of the RNA segments encoded by the novel viral gene is a partial inversed-reversed sequence of the nucleotide sequence of a binding site associated with at least one target host gene, and a function of the novel viral gene is bioinformatically deducible from the following data elements: the nucleotide sequence of the RNA encoded by the novel viral gene, a nucleotide sequence of the at least one target host gene, and function of the at least one target host gene.

[0020] Further in accordance with a preferred embodiment of the present invention the function of the novel viral gene is bioinformatically deducible from the following data elements: the nucleotide sequence of the RNA encoded by the bioinformatically detectable novel viral gene, a nucleotide sequence of the at least one target host gene, and a function of the at least one target host gene.

[0021] Still further in accordance with a preferred embodiment of the present invention the RNA encoded by the novel viral gene complementarily binds the binding site associated with the at least one target host gene, thereby modulating expression of the at least one target host gene.

[0022] Additionally in accordance with a preferred embodiment of the present invention the binding site associated with at least one target host gene is located in an untranslated region of RNA encoded by the at least one target host gene.

[0023] Moreover in accordance with a preferred embodiment of the present invention the function of the novel viral gene is selective inhibition of translation of the at least one target host gene, which selective inhibition includes complementary hybridization of the RNA encoded by the novel viral gene to the binding site.

[0024] Further in accordance with a preferred embodiment of the present invention the invention includes a vector including the DNA.

[0025] Still further in accordance with a preferred embodiment of the present invention the invention includes a method of selectively inhibiting translation of at least one gene, including introducing the vector.

[0026] Moreover in accordance with a preferred embodiment of the present invention the introducing includes utilizing RNAi pathway.

[0027] Additionally in accordance with a preferred embodiment of the present invention the invention includes a gene expression inhibition system including: the vector, and a vector inserter, functional to insert the vector into a cell, thereby selectively inhibiting translation of at least one gene.

[0028] Further in accordance with a preferred embodiment of the present invention the invention includes a probe including the DNA.

[0029] Still further in accordance with a preferred embodiment of the present invention the invention includes a method of selectively detecting expression of at least one gene, including using the probe.

[0030] Additionally in accordance with a preferred embodiment of the present invention the invention includes a gene expression detection system including: the probe, and a gene expression detector functional to selectively detect expression of at least one gene.

[0031] Further in accordance with a preferred embodiment of the present invention the invention includes an anti-viral substance capable of neutralizing the RNA.

[0032] Still further in accordance with a preferred embodiment of the present invention the neutralizing includes complementarily binding the RNA.

[0033] Additionally, in accordance with a preferred embodiment of the present invention the neutralizing includes immunologically neutralizing.

[0034] Moreover in accordance with a preferred embodiment of the present invention the invention includes a method for anti-viral treatment including neutralizing the RNA.

[0035] Further in accordance with a preferred embodiment of the present invention the neutralizing includes: synthesizing a complementary nucleic acid molecule, a nucleic sequence of which complementary nucleic acid molecule is a partial inversed-reversed sequence of the RNA, and transfecting host cells with the complementary nucleic acid molecule, thereby complementarily binding the RNA.

[0036] Still further in accordance with a preferred embodiment of the present invention the neutralizing includes immunologically neutralizing.

### BRIEF DESCRIPTION OF DRAWINGS

[0037] FIG. 1 is a simplified diagram illustrating a mode by which viral genes of a novel group of viral genes of the present invention, modulate expression of known host target genes;

[0038] FIG. 2 is a simplified block diagram illustrating a bioinformatic gene detection system capable of detecting genes of the novel group of genes of the present invention, which system is constructed and operative in accordance with a preferred embodiment of the present invention;

[0039] FIG. 3 is a simplified flowchart illustrating operation of a mechanism for training of a computer system to recognize the novel genes of the present invention, which mechanism is constructed and operative in accordance with a preferred embodiment of the present invention;

[0040] FIG. 4A is a simplified block diagram of a non-coding genomic sequence detector constructed and operative in accordance with a preferred embodiment of the present invention;

[0041] FIG. 4B is a simplified flowchart illustrating operation of a non-coding genomic sequence detector constructed and operative in accordance with a preferred embodiment of the present invention;

[0042] FIG. 5A is a simplified block diagram of a hairpin detector constructed and operative in accordance with a preferred embodiment of the present invention;

[0043] FIG. 5B is a simplified flowchart illustrating operation of a hairpin detector constructed and operative in accordance with a preferred embodiment of the present invention;

[0044] FIG. 6A is a simplified block diagram of a dicer-cut location detector constructed and operative in accordance with a preferred embodiment of the present invention;

[0045] FIG. 6B is a simplified flowchart illustrating training of a dicer-cut location detector constructed and operative in accordance with a preferred embodiment of the present invention;

[0046] FIG. 7A is a simplified block diagram of a target-gene binding-site detector constructed and operative in accordance with a preferred embodiment of the present invention;

[0047] FIG. 7B is a simplified flowchart illustrating operation of a target-gene binding-site detector constructed and operative in accordance with a preferred embodiment of the present invention;

[0048] FIG. 8 is a simplified flowchart illustrating operation of a function & utility analyzer constructed and operative in accordance with a preferred embodiment of the present invention;

[0049] FIG. 9 is a simplified diagram describing a novel bioinformatically detected group of regulatory genes, referred to here as Genomic Record (GR) genes, each of which encodes an ‘operon-like’ cluster of novel miRNA-like genes, which in turn modulates expression of a plurality of target genes;

[0050] FIG. 10 is a block diagram illustrating different utilities of genes of a novel group of genes, and operons of a novel group of operons, both of the present invention;

[0051] FIGS. 11A and 11B are simplified diagrams, which when taken together illustrate a mode of gene therapy applicable to genes of the novel group of genes of the present invention;

[0052] FIG. 12A is an annotated sequence of EST72223 comprising novel gene GAM24 detected by the gene detection system of the present invention;

[0053] FIGS. 12B and 12C are pictures of laboratory results, which when taken together demonstrate laboratory confirmation of expression of the bioinformatically detected novel gene GAM24 of FIG. 12A;

[0054] FIG. 12D provides pictures of laboratory results, which when taken together demonstrate further laboratory confirmation of expression of the bioinformatically detected novel gene GAM24 of FIG. 12A;

[0055] FIG. 13A is an annotated sequence of an EST7929020 comprising novel genes GAM23 and GAM25 detected by the gene detection system of the present invention;

[0056] FIG. 13B is a picture of laboratory results, which confirm expression of bioinformatically detected novel genes GAM23 and GAM25 of FIG. 13A;

[0057] FIG. 13C is a picture of laboratory results, which confirm endogenous expression of bioinformatically detected novel gene GAM25 of FIG. 15A;

[0058] FIG. 14A is an annotated sequence of an EST1388749 comprising novel gene GAM26 detected by the gene detection system of the present invention;

[0059] FIG. 14B is a picture of laboratory results, which confirm expression of the bioinformatically detected novel gene GAM26 of FIG. 14A;

[0060] FIGS. 15A through 1000D are schematic diagrams illustrating sequences, functions and utilities of 986 specific viral genes of the novel group of viral regulatory genes of the present invention, detected using the bioinformatic gene detection system described hereinabove with reference to FIGS. 1 through 8; and

[0061] FIGS. 3088 through 3308 are schematic diagrams illustrating sequences, functions and utilities of 221 specific viral genes of a group of novel regulatory ‘operon-like’ viral genes of the present invention, detected using the bioinformatic gene detection system described hereinabove with reference to FIGS. 9 through 14.

### DETAILED DESCRIPTION OF A PREFERRED EMBODIMENT

[0062] Reference is now made to FIG. 1 which is a simplified diagram illustrating a mode by which genes of a novel group of genes of the present invention, modulate expression of known host target.

[0063] The novel genes of the present invention are micro RNA (miRNA)-like, regulatory RNA genes, modulating expression of known host target. This mode of modulation is common to other known miRNA genes, as described hereinabove with reference to the background of the invention section.

[0064] VGAM GENE and TARGET GENE are two human genes contained in the DNA of the human genome.

[0065] VGAM GENE encodes a VGAM PRECURSOR RNA. However, similar to other miRNA genes, and unlike most ordinary genes, its RNA, VGAM PRECURSOR RNA, does not encode a protein.

[0066] VGAM PRECURSOR RNA folds onto itself, forming VGAM FOLDED PRECURSOR RNA. As FIG. 8 illustrates, VGAM FOLDED PRECURSOR RNA forms a ‘hairpin structure’, folding onto itself. As is well known in the art, this ‘hairpin structure’, is typical genes of the miRNA genes, and is due to the fact that nucleotide sequence of the first half of the RNA of a gene in this group is an accurate or partial inversed-reversed sequence of the nucleotide sequence of its second half. By “inversed-reversed” is meant a sequence which is reversed and wherein each nucleotide is replaced by a complimentary nucleotide, as is well known in the art (e.g. ATGGC is the inversed-reversed sequence of GCCAT).

[0067] An enzyme complex, designated DICER COMPLEX, ‘dices’ the VGAM FOLDED PRECURSOR RNA into a single stranded RNA segment, about 22 nucleotides long, designated VGAM RNA. As is known in the art, ‘dicing’ of the hairpin structured RNA precursor into shorter RNA segments about 22 nucleotides long by a Dicer type enzyme is catalyzed by an enzyme complex comprising an enzyme called Dicer together with other necessary proteins.

[0068] TARGET GENE encodes a corresponding messenger RNA, designated TARGET RNA. This TARGET RNA comprises 3 regions: a 5′ untranslated region, a protein coding region and a 3′ untranslated region, designated 5′UTR, PROTEIN CODING and 3′UTR respectively.

[0069] VGAM RNA binds complementarily a BINDING SITE, located on the 3′UTR segment of TARGET RNA. This complementarily binding is due to the fact that the nucleotide sequence of VGAM RNA is an accurate or partial inversed-reversed sequence of the nucleotide sequence of BINDING SITE.

[0070] The complimentary binding of VGAM RNA to BINDING SITE inhibits translation of TARGET RNA into TARGET PROTEIN. TARGET PROTEIN is therefore outlined by a broken line.

[0071] It is appreciated by one skilled in the art that the mode of transcriptional inhibition illustrated by FIG. 1 with specific reference to VGAM genes of the present invention, is in fact common to all other miRNA genes. A specific complimentary binding site has been demonstrated only for Lin-4 and Let-7. All the other 93 newly discovered miRNA genes are also believed by those skilled in the art to modulate expression of other genes by complimentary binding, although specific complimentary binding sites for these genes have not yet been found (Ruvkun G., ‘Perspective: Glimpses of a tiny RNA world’, Science 294, 779 (2001)). The present invention discloses a novel group of genes, the VGAM genes, belonging to the miRNA genes group, and for which a specific an complimentary binding has been determined.

[0072] Reference is now made to FIG. 2 which is a simplified block diagram illustrating a bioinformatic gene detection system capable of detecting genes of the novel group of genes of the present invention, which system is constructed and operative in accordance with a preferred embodiment of the present invention.

[0073] A centerpiece of the present invention is a bioinformatic gene detection engine 100, which is a preferred implementation of a mechanism capable of bioinformatically detecting genes of the novel group of genes of the present invention.

[0074] The function of the bioinformatic gene detection engine 100 is as follows: it receives three types of input, expressed RNA data 102, sequenced DNA data 104, and protein function data 106, performs a complex process of analysis of this data as elaborated below, and based on this analysis produces output of a bioinformatically detected group of novel genes designated 108.

[0075] Expressed RNA data 102 comprises published expressed sequence tags (EST) data, mRNA data, as well as other sources of published RNA data. Sequenced DNA data 104 comprises alphanumeric data describing sequenced genomic data, which preferably includes annotation data such as location of known protein coding regions relative to the sequenced data. Protein function data 106 comprises scientific publications reporting studies which elucidated physiological function known proteins, and their connection, involvement and possible utility in treatment and diagnosis of various diseases. Expressed RNA data 102, sequenced DNA data 104 may preferably be obtained from data published by the National Center for Bioinformatics (NCBI) at the National Institute of Health (NIH), as well as from various other published data sources. Protein function data 106 may preferably be obtained from any one of numerous relevant published data sources, such as the Online Mendelian Inherited Disease In Man (OMIM) database developed by John Hopkins University, and also published by NCBI.

[0076] Prior to actual detection of bioinformatically detected novel genes 108 by the bioinformatic gene detection engine 100, a process of bioinformatic gene detection engine training & validation designated 110 takes place. This process uses the known miRNA genes as a training set (some 200 such genes have been found to date using biological laboratory means), to train the bioinformatic gene detection engine 100 to bioinformatically recognize miRNA-like genes, and their respective potential target binding sites. Bioinformatic gene detection engine training & validation 110 is further describe hereinbelow with reference to FIG. 3.

[0077] The bioinformatic gene detection engine 100 comprises several modules which are preferably activated sequentially, and are described as follows:

[0078] A non-coding genomic sequence detector 112 operative to bioinformatically detect non-protein coding genomic sequences. The non-coding genomic sequence detector 112 is further described hereinbelow with reference to FIGS. 4A and 4B.

[0079] A hairpin detector 114 operative to bioinformatically detect genomic ‘hairpin-shaped’ sequences, similar to VGAM FOLDED PRECURSOR of FIG. 1. The hairpin detector 114 is further described hereinbelow with reference to FIGS. 5A and 5B.

[0080] A dicer-cut location detector 116 operative to bioinformatically detect the location on a hairpin shaped sequence which is enzymatically cut by DICER COMPLEX of FIG. 1. The dicer-cut location detector 116 is further described hereinbelow with reference to FIG. 6A.

[0081] A target-gene binding-site detector 118 operative to bioinformatically detect host target having binding sites, the nucleotide sequence of which is partially complementary to that of a given genomic sequence, such as a sequence cut by DICER COMPLEX of FIG. 1. The target-gene binding-site detector 118 is further described hereinbelow with reference to FIGS. 7A and 7B.

[0082] A function & utility analyzer 120 operative to analyze function and utility of host target, in order to identify host target which have a significant clinical function and utility. The function & utility analyzer 120 is further described hereinbelow with reference to FIG. 8.

[0083] Hardware implementation of the bioinformatic gene detection engine 100 is important, since significant computing power is preferably required in order to perform the computation of bioinformatic gene detection engine 100 in reasonable time and cost. As an example, it is estimated that using one powerful 8-processor PC Server, over 30 months of computing time (at 24 hours per day) would be required in order to detect all miRNA genes in human EST data, and their respective binding sites.

[0084] For example, in order to address this challenge at reasonable time and cost, a preferred embodiment of the present invention may comprise a cluster of a large number of personal computers (PCs), such as 100 PCs (Pentium IV, 1.7 GHz, with 40 GB storage each), connected by Ethernet to several strong servers, such as 4 servers (2-CPU, Xeon 2.2 GHz, with 200 GB storage each), combined with an 8-processor server (8-CPU, Xeon 550 Mhz w/8 GB RAM) connected via 2 HBA fiber-channels to an EMC Clariion 100-disks, 3.6 Terabyte storage device. Additionally, preferably an efficient database computer program, such as Microsoft™ SQL-Server database computer program is used and is optimized to the specific requirements of bioinformatic gene detection engine 100. Furthermore, the PCs are preferably optimized to operate close to 100% CPU usage continuously, as is known in the art. Using suitable hardware and software may preferably reduce the required calculation time in the abovementioned example from 30 months to 20 days.

[0085] It is appreciated that the abovementioned hardware configuration is not meant to be limiting, and is given as an illustration only. The present invention may be implemented in a wide variety of hardware and software configurations.

[0086] The present invention discloses 3815 novel viral genes of the VGAM group of genes, which have been detected bioinformatically, as described hereinbelow with reference to FIGS. 15 through 3829. Laboratory confirmation of 4 genes of the GAM group of genes is described hereinbelow with reference to FIGS. 7A through 16.

[0087] Reference is now made to FIG. 3 which is a simplified flowchart illustrating operation of a mechanism for training of a computer system to recognize the novel genes of the present invention. This mechanism is a preferred implementation of the bioinformatic gene detection engine training & validation 110 described hereinabove with reference to FIG. 2.

[0088] Bioinformatic gene detection engine training & validation 110 of FIG. 2 begins by training the bioinformatic gene detection engine to recognize known miRNA genes, as designated by numeral 122. This training step comprises hairpin detector training & validation 124, further described hereinbelow with reference to FIG. 12 A, dicer-cut location detector training & validation 126, further described hereinbelow with reference to FIGS. 6A and 6B, and target-gene binding-site detector training & validation 128, further described hereinbelow with reference to FIG. 7A.

[0089] Next, the bioinformatic gene detection engine 100 is used to bioinformatically detect sample novel genes, as designated by numeral 130. An example of a sample novel gene thus detected is described hereinbelow with reference to FIG. 12.

[0090] Finally, wet lab experiments are preferably conducted in order to validate expression and preferably function the sample novel genes detected by the bioinformatic gene detection engine 100 in the previous step. An example of wet-lab validation of the above-mentioned sample novel gene bioinformatically detected by the system is described hereinbelow with reference to FIGS. 13A and 13B.

[0091] Reference is now made to FIG. 4A which is a simplified block diagram of a preferred implementation of the non-coding genomic sequence detector 112 described hereinabove with reference to FIG. 2. Non-protein coding genomic sequence detector 112 of FIG. 2 preferably receives as input at least two types of published genomic data: expressed RNA data 102, including EST data and mRNA data, and sequenced DNA data 104. After its initial training, indicated by numeral 134, and based on the abovementioned input data, the non-protein coding genomic sequence detector 112 produces as output a plurality of non-protein coding genomic sequences 136. Preferred operation of the non-protein coding genomic sequence detector 112 is described hereinbelow with reference to FIG. 4B.

[0092] Reference is now made to FIG. 4B which is a simplified flowchart illustrating a preferred operation of the non-coding genomic sequence detector 112 of FIG. 2. Detection of non-protein coding genomic sequences to be further analyzed by the system generally preferably progresses in one of the following two paths.

[0093] A first path for detecting non-protein coding genomic sequences begins by receiving a plurality of known RNA sequences, such as EST data. Each RNA sequence is first compared to all known protein-coding sequences, in order to select only those RNA sequences which are non-protein coding. This can preferably be performed by BLAST comparison of the RNA sequence to known protein coding sequences. The above-mentioned BLAST comparison to the DNA preferably also provides the localization of the RNA on the DNA.

[0094] Optionally, an attempt may be made to ‘expand’ the non-protein RNA sequences thus found, by searching for transcription start and end signals, upstream and downstream of location of the RNA on the DNA respectively, as is well known in the art.

[0095] A second path for detecting non-protein coding genomic sequences starts by receiving DNA sequences. The DNA sequences are parsed into non protein coding sequences, based on published DNA annotation data: extracting those DNA sequences which are between known protein coding sequences. Next, transcription start and end signals are sought. If such signals are found, and depending on their ‘strength’, probable expressed non-protein coding genomic sequences are yielded.

[0096] Reference is now made to FIG. 5A which is a simplified block diagram of a preferred implementation of the hairpin detector 114 described hereinabove with reference to FIG. 2.

[0097] The goal of the hairpin detector 114 is to detect ‘hairpin’ shaped genomic sequences, similar to those of known miRNA genes. As mentioned hereinabove with reference to FIG. 1, a ‘hairpin’ genomic sequence refers to a genomic sequence which ‘folds onto itself’ forming a hairpin like shape, due to the fact that nucleotide sequence of the first half of the nucleotide sequence is an accurate or

[0098] The hairpin detector 114 of FIG. 2 receives as input a plurality of non-protein coding genomic sequences 136 of FIG. 4A, and after a phase of hairpin detector training & validation 124 of FIG. 3, is operative to detect and output ‘hairpin shaped’ sequences found in the input expressed non-protein coding sequences, designated by numeral 138.

[0099] The phase of hairpin detector training & validation 124 is an iterative process of applying the hairpin detector 114 to known hairpin shaped miRNA genes, calibrating the hairpin detector 114 such that it identifies the training set of known hairpins, as well as sequences which are similar thereto. Preferred operation of the hairpin detector 114 is described hereinbelow with reference to FIG. 5B.

[0100] Reference is now made to FIG. 5B which is a simplified flowchart illustrating a preferred operation of the hairpin detector 114 of FIG. 2.

[0101] A hairpin structure is a two dimensional folding structure, resulting from the nucleotide sequence pattern: the nucleotide sequence of the first half of the hairpin sequence is an inversed-reversed sequence of the second half thereof. Different methodologies are known in the art for detection of various two dimensional and three dimensional hairpin structures.

[0102] In a preferred embodiment of the present invention, the hairpin detector 114 initially calculates possible 2-dimensional (2D) folding patterns of a given one of the non-protein coding genomic sequences 136, preferably using a 2D folding algorithm based on free-energy calculation, such as the Zucker algorithm, as is well known in the art.

[0103] Next, the hairpin detector 114 analyzes the results of the 2D folding, in order to determine the presence, and location of hairpin structures. A 2D folding algorithm typically provides as output a listing of the base-pairing of the 2D folded shape, i.e. a listing of which all two pairs of nucleotides in the sequence which will bond. The goal of this second step, is to assess this base-pairing listing, in order to determine if it describes a hairpin type bonding pattern.

[0104] The hairpin detector 114 then assess those hairpin structures found by the previous step, comparing them to hairpins of known miRNA genes, using various parameters such as length, free-energy, amount and type of mismatches, etc. Only hairpins that bear statistically significant resemblance of the population of hairpins of known miRNAs, according to the abovementioned parameters are accepted.

[0105] Lastly, the hairpin detector 114 attempts to select those hairpin structures which are as stable as the hairpins of know miRNA genes. This may be achieved in various manners. A preferred embodiment of the present invention utilizes the following methodology comprising three steps:

[0106] First, the hairpin detector 114 attempts to group potential hairpins into ‘families’ of closely related hairpins. As is known in the art, a free-energy calculation algorithm, typically provides multiple ‘versions’ each describing a different possible 2D folding pattern for the given genomic sequence, and the free energy of such possible folding. The hairpin detector 114 therefore preferably assesses all hairpins found on all ‘versions’, grouping hairpins which appear in different versions, but which share near identical locations into a common ‘family’ of hairpins. For example, all hairpins in different versions, the center of which is within 7 nucleotides of each other may preferably be grouped to a single ‘family’.

[0107] Next, hairpin ‘families’ are assessed, in order to select only those families which represent hairpins that are as stable as those of known miRNA hairpins. For example, preferably only families which are represented in at least 65% of the free-energy calculation 2D folding versions, are considered stable.

[0108] Finally, an attempt is made to select the most suitable hairpin from each selected family. For example, preferably the hairpin which appears in more versions than other hairpins, and in versions the free-energy of which is lower, may be selected.

[0109] Reference is now made to FIG. 6A which is a simplified block diagram of a preferred implementation of the dicer-cut location detector 116 described hereinabove with reference to FIG. 2.

[0110] The goal of the dicer-cut location detector 116 is to detect the location in which DICER COMPLEX of FIG. 1, comprising the enzyme Dicer, would ‘dice’ the given hairpin sequence, similar to VGAM FOLDED PRECURSOR RNA, yielding VGAM RNA both of FIG. 1.

[0111] The dicer-cut location detector 116 of FIG. 2 therefore receives as input a plurality of hairpins on genomic sequences 138 of FIG. 5A, which were calculated by the previous step, and after a phase of dicer-cut location detector training & validation 126 of FIG. 3, is operative to detect a respective plurality of dicer-cut sequences from hairpins 140, one for each hairpin.

[0112] In a preferred embodiment of the present invention, the dicer-cut location detector 116 preferably uses a combination of neural networks, Bayesian networks, Markovian modeling, and Support Vector Machines (SVMs) trained on the known dicer-cut locations of known miRNA genes, in order to detect dicer-cut locations. Dicer-cut location detector training & validation 126, which is further described hereinbelow with reference to FIG. 6B.

[0113] Reference is now made to FIG. 6 B which is a simplified flowchart illustrating a preferred implementation of dicer-cut location detector training & validation 126 of FIG. 3. Dicer-cut location detector 116 first preprocesses known miRNA hairpins and their respective dicer-cut locations, so as to be able to properly analyze them and train the detection system accordingly:

[0114] The folding pattern is calculated for each known miRNA, preferably based on free-energy calculation, and the size of the hairpin, the size of the loop at the center of the hairpin, and ‘bulges’ (i.e. mismatched base-pairs) in the folded hairpin are noted.

[0115] The dicer-cut location, which is known for known miRNA genes, is noted relative to the above, as well as to the nucleotides in each location along the hairpin. Frequency of identity of nucleotides, and nucleotide-pairing, relative to their location in the hairpin, and relative to the known dicer-cut location in the known miRNA genes is analyzed and modeled.

[0116] Different techniques are well known in the art for analysis of existing pattern from a given ‘training set’ of species belonging to a genus, which techniques are then capable, to a certain degree, to detect similar patterns in other species not belonging to the training-set genus. Such techniques include, but are not limited to neural networks, Bayesian networks, Support Vector Machines (SVM), Genetic Algorithms, Markovian modeling, and others, as is well known in the art.

[0117] Using such techniques, preferably a combination of several of the above techniques, the known hairpins are represented as a several different networks (such as neural, Bayesian, or SVM) input and output layers. Both nucleotide, and ‘bulge’ (i.e. nucleotide pairing or mismatch) are represented for each position in the hairpin, at the input layer, and a corresponding true/false flag at each position, indicating whether it was diced by dicer at the output layer. Multiple networks are preferably used concurrently, and the results therefrom are integrated and further optimized. Markovian modeling may also be used to validate the results and enhance their accuracy. Finally, the bioinformatic detection of dicer-cut location of a sample novel is confirmed by wet-lab experimentation.

[0118] Reference is now made to FIG. 7A which is a simplified block diagram of a preferred implementation of the target-gene binding-site detector 118 described hereinabove with reference to FIG. 2. The goal of the target-gene binding-site detector 118 is to detect a BINDING SITE of FIG. 1, located in an untranslated region of the RNA of a known gene, the nucleotide sequence of which BINDING SITE is at least partially complementary to that of a VGAM RNA of FIG. 1, thereby determining that the abovementioned known gene is a target gene of VGAM of FIG. 1.

[0119] The target-gene binding-site detector 118 of FIG. 2 therefore receives as input a plurality of dicer-cut sequences from hairpins 140 of FIG. 6A which were calculated by the previous step, and a plurality of potential target gene sequences 142 which derive sequence DNA data 104 of FIG. 2, and after a phase of target-gene binding-site detector training & validation 128 of FIG. 3, is operative to detect target-genes having binding site/s 144 the nucleotide sequence of which is at least partially complementary to that of each of the plurality of dicer-cut sequences from hairpins 140. Preferred operation of the target-gene binding-site detector is further described hereinbelow with reference to FIG. 7B.

[0120] Reference is now made to FIG. 7B which is a simplified flowchart illustrating a preferred operation of the target-gene binding-site detector 118 of FIG. 2. In a preferred embodiment of the present invention, the target-gene binding-site detector 118 first performs a BLAST comparison of the nucleotide sequence of each of the plurality of dicer-cut sequences from hairpins 140, to the potential target gene sequences 142, in order to find crude potential matches. Blast results are then filtered to results which are similar to those of known binding sites (e.g. binding sites of miRNA genes Lin-4 and Let-7 to target genes Lin-14, Lin-41, Lin 28 etc.). Next the binding site is expanded, checking if nucleotide sequenced immediately adjacent to the binding site found by BLAST, may improve the match. Suitable binding sites, then are computed for free-energy and spatial structure. The results are analyzed, selecting only those binding sites, which have free-energy and spatial structure similar to that of known binding sites.

[0121] Reference is now made to FIG. 8 which is a simplified flowchart illustrating a preferred operation of the function & utility analyzer 120 described hereinabove with reference to FIG. 2. The goal of the function & utility analyzer 120 is to determine if a potential target gene is in fact a valid clinically useful target gene. Since a potential novel VGAM gene binding a binding site in the UTR of a target gene is understood to inhibit expression of that target gene, and if that target gene is shown to have a valid clinical utility, then in such a case it follows that the potential novel gene itself also has a valid useful function—which is the opposite of that of the target gene.

[0122] The function & utility analyzer 120 preferably receives as input a plurality of potential novel target genes having binding-site/s 144, generated by the target-gene binding-site detector 118, both of FIG. 7A. Each potential gene, is evaluated as follows:

[0123] First the system first checks to see if the function of the potential target gene is scientifically well established. Preferably, this can be achieved bioinformatically by searching various published data sources presenting information on known function of proteins. Many such data sources exist and are published as is well known in the art.

[0124] Next, for those target genes the function of which is scientifically known and is well documented, the system then checks if scientific research data exists which links them to known diseases. For example, a preferred embodiment of the present invention utilizes the OMIM™ database published by NCBI, which summarizes research publications relating to genes which have been shown to be associated with diseases.

[0125] Finally, the specific possible utility of the target gene is evaluated. While this process too may be facilitated by bioinformatic means, it might require human evaluation of published scientific research regarding the target gene, in order to determine the utility of the target gene to the diagnosis and or treatment of specific disease. Only potential novel genes, the target-genes of which have passed all three examinations, are accepted as novel genes.

[0126] Reference is now made to FIG. 9, which is a simplified diagram describing a novel bioinformatically detected group of regulatory genes, referred to here as Genomic Record (GR) genes, that encode an ‘operon-like’ cluster of novel miRNA-like genes, each modulating expression of a plurality of host target, the function and utility of which target genes is known.

[0127] GR GENE (Genomic Record Gene) is gene of a novel, bioinformatically detected group of regulatory, non protein coding, RNA genes. The method by which GR is detected is described hereinabove with reference to FIGS. 6-15.

[0128] GR GENE encodes an RNA molecule, typically several hundred nucleotides long, designated GR PRECURSOR RNA.

[0129] GR PRECURSOR RNA folds spatially, as illustrated by GR FOLDED PRECURSOR RNA, into a plurality of what is known in the art as ‘hair-pin’ structures. The nucleotide sequence of GR PRECURSOR RNA comprises a plurality of segments, the first half of each such segment having a nucleotide sequence which is at least a partial inversed-reversed sequence of the second half thereof, thereby causing formation of a plurality of ‘hairpin’ structures, as is well known in the art.

[0130] GR FOLDED PRECURSOR RNA is naturally processed by cellular enzymatic activity, into 3 separate hairpin shaped RNA segments, each corresponding to VGAM PRECURSOR RNA of FIG. 1, designated VGAM1 PRECURSOR, VGAM2 PRECURSOR and VGAM3 PRECURSOR respectively.

[0131] The above mentioned VGAM precursors, are diced by Dicer of FIG. 1, yielding short RNA segments of about 22 nucleotides in length, each corresponding to VGAM RNA of FIG. 1, designated VGAM1, VGAM2 and VGAM3 respectively.

[0132] VGAM1, VGAM2 and VGAM3 each bind complementarily to binding sites located in untranslated regions of respective host target, designated VGAM1-TARGET RNA, VGAM2-TARGET RNA and VGAM3-TARGET RNA respectively. This binding inhibits translation of the respective target proteins designated VGAM1-TARGET PROTEIN, VGAM2-TARGET PROTEIN and VGAM3-TARGET PROTEIN respectively.

[0133] The structure of VGAM genes comprised in a GR GENE, and their mode of modulation of expression of their respective target genes is described hereinabove with reference to FIG. 1. The bioinformatic approach to detection of VGAM genes comprised in a GR GENE is described hereinabove with reference to FIGS. 9 through 14.

[0134] The present invention discloses 221 novel viral genes of the GR group of genes, which have been detected bioinformatically, as described hereinbelow with reference to FIGS. 3088 through 3308. Laboratory confirmation of 3 genes of the GR group of genes is described hereinbelow with reference to FIGS. 9A through 14.

[0135] In summary, the current invention discloses a very large number of novel viral GR genes, each of which encodes a plurality of VGAM genes, which in turn may modulate expression of a plurality of host target proteins.

[0136] Reference is now made to FIG. 10 which is a block diagram illustrating different utilities of genes of the novel group of genes of the present invention referred to here as VGAM genes and GR genes.

[0137] The present invention discloses a first plurality of novel genes referred to here as VGAM genes, and a second plurality of operon-like genes referred to here as GR genes, each of the GR genes encoding a plurality of VGAM genes. The present invention further discloses a very large number of known target-genes, which are bound by, and the expression of which is modulated by each of the novel genes of the present invention. Published scientific data referenced by the present invention provides specific, substantial, and credible evidence that the abovementioned target genes modulated by novel genes of the present invention, are associated with various diseases. Specific novel genes of the present invention, target genes thereof and diseases associated therewith, are described hereinbelow with reference to FIGS. 15 through 3829. It is therefore appreciated that a function of VGAM genes and GR genes of the present invention is modulation of expression of target genes related to known diseases, and that therefore utilities of novel genes of the present invention include diagnosis and treatment of the abovementioned diseases. FIG. 10 describes various types of diagnostic and therapeutic utilities of novel genes of the present invention.

[0138] A utility of novel genes of the present invention is detection of VGAM genes and of GR genes. It is appreciated that since VGAM genes and GR genes modulate expression of disease related target genes, that detection of expression of VGAM genes in clinical scenarios associated with said diseases is a specific, substantial and credible utility. Diagnosis of novel genes of the present invention may preferably be implemented by RNA expression detection techniques, including but not limited to biochips, as is well known in the art. Diagnosis of expression of genes of the present invention may be useful for research purposes, in order to further understand the connection between the novel genes of the present invention and the abovementioned related diseases, for disease diagnosis and prevention purposes, and for monitoring disease progress.

[0139] Another utility of novel genes of the present invention is anti-VGAM gene therapy, a mode of therapy which allows up regulation of a disease related target-gene of a novel VGAM gene of the present invention, by lowering levels of the novel VGAM gene which naturally inhibits expression of that target gene. This mode of therapy is particularly useful with respect to target genes which have been shown to be under-expressed in association with a specific disease. Anti-VGAM gene therapy is further discussed hereinbelow with reference to FIGS. 11A and 11B.

[0140] A further utility of novel genes of the present invention is VGAM replacement therapy, a mode of therapy which achieves down regulation of a disease related target-gene of a novel VGAM gene of the present invention, by raising levels of the VGAM gene which naturally inhibits expression of that target gene. This mode of therapy is particularly useful with respect to target genes which have been shown to be over-expressed in association with a specific disease. VGAM replacement therapy involves introduction of supplementary VGAM gene products into a cell, or stimulation of a cell to produce excess VGAM gene products. VGAM replacement therapy may preferably be achieved by transfecting cells with an artificial DNA molecule encoding a VGAM gene, which causes the cells to produce the VGAM gene product, as is well known in the art.

[0141] Yet a further utility of novel genes of the present invention is modified VGAM therapy. Disease conditions are likely to exist, in which a mutation in a binding site of a VGAM gene prevents natural VGAM gene to effectively bind inhibit a disease related target-gene, causing up regulation of that target gene, and thereby contributing to the disease pathology. In such conditions, a modified VGAM gene is designed which effectively binds the mutated VGAM binding site, i.e. is an effective anti-sense of the mutated VGAM binding site, and is introduced in disease effected cells. Modified VGAM therapy is preferably achieved by transfecting cells with an artificial DNA molecule encoding the modified VGAM gene, which causes the cells to produce the modified VGAM gene product, as is well known in the art.

[0142] An additional utility of novel genes of the present invention is induced cellular differentiation therapy. As aspect of the present invention is finding genes which determine cellular differentiation, as described hereinabove with reference to FIG. 11. Induced cellular differentiation therapy comprises transfection of cell with such VGAM genes thereby determining their differentiation as desired. It is appreciated that this approach may be widely applicable, inter alia as a means for auto transplantation—harvesting cells of one cell-type from a patient, modifying their differentiation as desired, and then transplanting them back into the patient. It is further appreciated that this approach may also be utilized to modify cell differentiation in vivo, by transfecting cells in a genetically diseased tissue with a cell-differentiation determining VGAM gene, thus stimulating these cells to differentiate appropriately.

[0143] Reference is now made to FIGS. 11A and 11B, simplified diagrams which when taken together illustrate anti-VGAM gene therapy mentioned hereinabove with reference to FIG. 10. A utility of novel genes of the present invention is anti-VGAM gene therapy, a mode of therapy which allows up regulation of a disease related target-gene of a novel VGAM gene of the present invention, by lowering levels of the novel VGAM gene which naturally inhibits expression of that target gene. FIG. 11A shows a normal VGAM gene, inhibiting translation of a target gene of VGAM gene, by binding to a BINDING SITE found in an untranslated region of TARGET RNA, as described hereinabove with reference to FIG. 1.

[0144] FIG. 11B shows an example of anti-VGAM gene therapy. ANTI-VGAM RNA is short artificial RNA molecule the sequence of which is an anti-sense of VGAM RNA. Anti-VGAM treatment comprises transfecting diseased cells with ANTI-VGAM RNA, or with a DNA encoding thereof. The ANTI-VGAM RNA binds the natural VGAM RNA, thereby preventing binding of natural VGAM RNA to its BINDING SITE. This prevents natural translation inhibition of TARGET RNA by VGAM RNA, thereby up regulating expression of TARGET PROTEIN.

[0145] It is appreciated that anti-VGAM gene therapy is particularly useful with respect to target genes which have been shown to be under-expressed in association with a specific disease.

[0146] Reference is now made to FIG. 12A which is an annotated sequence of an EST comprising a novel gene detected by the gene detection system of the present invention. FIG. 12A shows the nucleotide sequence of a known human non-protein coding EST (Expressed Sequence Tag), identified as EST72223. It is appreciated that the sequence of this EST comprises sequences of one known miRNA gene, identified as MIR98, and of one novel GAM gene, referred to here as GAM24, detected by the bioinformatic gene detection system of the present invention, described hereinabove with reference to FIG. 2.

[0147] Reference is now made to FIGS. 12B and 12C that are pictures of laboratory results, which when taken together demonstrate laboratory confirmation of expression of the bioinformatically detected novel gene of FIG. 12A. Reference is now made to FIG. 12B which is a Northern blot analysis of MIR-98 and EST72223 transcripts. MIR-98 and EST72223 were reacted with MIR-98 and GAM24 probes as indicated in the figure. It is appreciated that the probes of both MIR-98 and GAM24 reacted with EST72223, indicating that EST72223 contains the sequences of MIR-98 and of GAM24. It is further appreciated that the probe of GAM24 does not cross-react with MIR-98.

[0148] Reference is now made to FIG. 12C. A Northern blot analysis of EST72223 and MIR-98 transfections were performed, subsequently marking RNA by the MIR-98 and GAM24 probes. Left, Northern reacted with MIR-98, Right, Northern reacted with GAM24. The molecular Sizes of EST72223, MIR-98 and GAM24 are indicated by arrows. Hela are control cells that have not been introduced to exogenous RNA. EST and MIR-98 Transfections are RNA obtained from Hela transfected with EST72223 and MIR-98, respectively. MIR-98 and EST are the transcripts used for the transfection experiment. The results indicate that EST72223, when transfected into Hela cells, is cut yielding known miRNA gene MIR-98 and novel miRNA gene GAM24.

[0149] Reference is now made to FIG. 12D, which is a Northern blot of a lisate experiment with MIR-98 and GAM24. Northern blot analysis of hairpins in EST72223. Left, Northern reacted with predicted Mir-98 hairpin probe, Right, Northern reacted with predicted GAM24 hairpin probe. The molecular size of EST Is indicated by arrow. The molecular sizes of Mir-98 and GAM24 are 80 nt and 100 nt, respectively as indicated by arrows. The 22 nt molecular marker is indicated by arrow. 1-Hela lysate; 2-EST incubated 4 h with Hela lysate; 3-EST without lysate; 4-Mir transcript incubated 4 h with Hela lysate; 5-Mir transcript incubated overnight with Hela lysate; 6-Mir transcript without lysate; 7-RNA extracted from Hela cells following transfection with Mir transcript.

[0150] Technical methods used in experiments, the results of which are depicted in FIGS. 12B, 12C and 12D are as follows:

[0151] Transcript Preparations:

[0152] Digoxigenin (DIG) labeled transcripts were prepared from EST72223 (TIGER), MIR98 and predicted precursor hairpins by using a DIG RNA labeling kit (Roche Molecular Biochemicals) according to the manufacture's protocol. Briefly, PCR products with T7 promoter at the 5′ end or T3 promoter at the 3′ end were prepared from each DNA in order to use it as a template to prepare sense and antisense transcripts, respectively.
[0153] MIR-98 was amplified using EST72223 as a templet with T7miR98 forward primer: 5-′TAATACGACTCACTATAGGGTGAGGTAGTAAGTTGTATTGTT-3′ and T3miR98 revse primer: 5′-AATTAACCCTCACTAAAGGGAAAGTAGTAAGTTGTATAGTT-3′ EST72223 was amplified with T7-EST 72223 forward primer: 5′-TAATACGACTCACTATAGGCCCTTATTAGAGGATTCTGCT-3′ and T3-EST72223 reverse primer: 5′-AATTAACCCTCACTAAAGGTTTTTTTTTCCTGAGACAGAGT-3′ Bet-4 was amplified using EST72223 as a templet with Bet-4 forward primer: 5′-GAGGCAGGAGAATTGCTTGA-3′ and T3-EST72223 reverse primer: 5′-AATTAACCCTCACTAAAGGCCTGAGACAGAGTCTTGCTC-3′

[0154] The PCR products were cleaned and used for DIG-labeled or unlabeled transcription reactions with the appropriate polymerase. For transfection experiments, CAP reaction was performed by using a mMassage mMachine kit (Ambion).

[0155] Transfection Procedure:

[0156] Transfection of Hela cells was performed by using TransMessenger reagent (Qiagen) according to the manufacture's protocol. Briefly, Hela cells were seeded to 1-2×10̂6 cells per plate a day before transfection. Two μg RNA transcripts were mixed with 8 μl Enhancer in a final volume of 100 μl, mixed and incubated at room temperature for 5 min. 16 μl TransMessenger reagent was added to the RNA-Enhancer, mixed and incubated for additional 10 min. Cell plates were washed with sterile PBS twice and then incubated with the transfection mix diluted with 2.5 ml DMEM medium without serum. Cells were incubated with transfection mix for three hours under their normal growth condition (370 C and 5% CO2) before the transfection mix was removed and a fresh DMEM medium containing serum was added to the cells. Cells were left to grow 48 hours before harvesting.

[0157] Target RNA Cleavage Assay:

[0158] Cap-labeled target RNAs were generated using mMessage mMachine™ (Ambion). Caped RNA transcripts were preincubated at 30° C. for 15 min in supplemented Hela S100 obtained from Computer Cell Culture, Mos, Belgium. After addition of all components, final concentrations were 100 mM target RNA, 1 m M ATP, 0.2 mM GTP, 10 U/ml RNasin, 30 μg/ml creatine kinase, 25 mM creatine phosphate, and 50% S100 extract. Incubation was continued for 4 hours to overnight. Cleavage reaction was stopped by the addition of 8 volumes of proteinase K buffer (200 Mm Tris-Hcl, pH 7.5, 25 m M EDTA, 300 mM NaCl, and 2% SDS). Proteinase K, dissolved in 50 mM Tris-HCl, pH 8, 5 m M CaCl2, and 50% glycerol, was added to a final concentration of 0.6 mg/ml. Sample were subjected to phenol/chlorophorm extraction and kept frozen until analyzed by urea-TBE PAGE.

[0159] Northern Analysis:

[0160] RNAs were extracted from cells by using Tri-reagent according to the manufacture's protocol. The RNAs were dissolved in water and heated to 650 C to disrupt any association of the 25 nt RNA with larger RNA molecules. RNA were placed on ice and incubated for 30 min with PEG (MW=8000) in a final concentration of 5% and NaCl in a final concentration of 0.5M to precipitate high molecular weight nucleic acid. The RNAs were centrifuged at 10,000×g for 10 min to pellet the high molecular weight nucleic acid. The supernatant containing the low molecular weight RNAs was collected and three volumes of ethanol was added. The RNAs were placed at −200 C for at least two hours and then centrifuged at 10,000×g for 10 min. The pellets were dissolved in Urea-TBE buffer (1Xtbe, 7M urea) for further analysis by a Northern blot.

[0161] RNA samples were boiled for 5 min before loading on 15%-8% polyacrylamide (19:1) gels containing 7M urea and 1×TBE. Gels were run in 1×TBE at a constant voltage of 300V and then transferred into a nylon membrane. The membrane was exposed to 3 min ultraviolet light to cross link the RNAs to the membrane. Hybridization was performed overnight with DIG-labeled probes at 420 C. Membranes were washed twice with SSCx2 and 0.2% SDS for 10 min. at 420 C and then washed twice with SSCx0.5 for 5 min at room temperature. The membrane was then developed by using a DIG luminescent detection kit (Roche) using anti DIG and CSPD reaction, according to the manufacture's protocol.

[0162] It is appreciated that the data presented in FIGS. 12A, 12B, 12C and 12D, when taken together validate the function of the bioinformatic gene detection engine 100 of FIG. 2. FIG. 12A shows a novel GAM gene bioinformatically detected by the bioinformatic gene detection engine 100, and FIGS. 12B, 12C and 12D show laboratory confirmation of the expression of this novel gene. This is in accord with the engine training and validation methodology described hereinabove with reference to FIG. 3.

[0163] Reference is now made to FIG. 13A which is an annotated sequence of an EST comprising a novel gene detected by the gene detection system of the present invention. FIG. 13A shows the nucleotide sequence of a known human non-protein coding EST (Expressed Sequence Tag), identified as EST 7929020. It is appreciated that the sequence of this EST comprises sequences of two novel GAM genes, referred to here as GAM23 and GAM25, detected by the bioinformatic gene detection system of the present invention, described hereinabove with reference to FIG. 2.

[0164] Reference is now made to FIG. 13B which presents pictures of laboratory results, that demonstrate laboratory confirmation of expression of the bioinformatically detected novel gene of FIG. 13A. Northern blot analysis of hairpins in EST7929020. Left, Northern reacted with predicted GAM25 hairpin probe, Right, Northern reacted with predicted GAM23 hairpin probe. The molecular size of EST is indicated by arrow. The molecular sizes of GAM23 and GAM25 are 60 nt, as indicated by arrow. The 22 nt molecular marker is indicated by arrow. 1-Hela lysate; 2-EST incubated 4 h with Hela lysate; 3-EST incubated overnight with Hela lysate; 4-EST without lysate; 5-GAM transcript; 6-GAM 22 nt marker; 7-GAM PCR probe; 8-RNA from control Hela cells; 9-RNA extracted from Hela cells following transfection with EST.

[0165] Reference is now made to FIG. 13C which is a picture of a Northern blot confirming Endogenous expression of bioinformatically detected gene GAM25 of FIG. 13A from in Hela cells. Northern was reacted with a predicted GAM25 hairpin probe. The molecular size of EST7929020 is indicated. The molecular sizes of GAM25 is 58 nt, as indicated. A 19 nt DNA oligo molecular marker is indicated. Endogenous expression of GAM25 in Hela total RNA fraction and in S-100 fraction is indicated by arrows. 1-GAM25 transcript; 2-GAM25 DNA oligo marker; 3-RNA from control Hela cells; 4-RNA extracted from Hela cells following transfection with EST; 5-RNA extracted from S-100 Hela lysate.

[0166] Reference is now made to FIG. 14A which is an annotated sequence of an EST comprising a novel gene detected by the gene detection system of the present invention. FIG. 14A shows the nucleotide sequence of a known human non-protein coding EST (Expressed Sequence Tag), identified as EST 1388749. It is appreciated that the sequence of this EST comprises sequence of a novel GAM gene, referred to here as GAM26, detected by the bioinformatic gene detection system of the present invention, described hereinabove with reference to FIG. 2.

[0167] Reference is now made to FIG. 14B which is a picture of Northern blot analysis, confirming expression of novel bioinformatically detected gene GAM26, and natural processing thereof from EST1388749. Northern reacted with predicted GAM26 hairpin probe. The molecular size of EST is indicated by arrow. The molecular sizes of GAM26 is 130 nt, as indicated by arrow. The 22 nt molecular marker is indicated by arrow. 1-Hela lysate; 2-EST incubated 4 h with Hela lysate; 3-EST incubated overnight with Hela lysate; 4-EST without lysate; 5-GAM transcript; 6-GAM 22 nt marker; 7-GAM PCR probe.

[0168] Reference is now made to FIG. 15A, which is a simplified diagram providing a conceptual explanation of the mode by which a novel bioinformatically detected viral gene, referred to here as Viral Genomic Address Messenger 15 (VGAM15) modulates expression of host target genes thereof, the function and utility of which host target genes is known in the art.

[0169] VGAM15 is a novel bioinformatically detected regulatory, non protein coding, viral micro RNA (miRNA) gene. The method by which VGAM15 was detected is described hereinabove with reference to FIGS. 2-8.

[0170] VGAM15 GENE is a viral gene contained in the genome of Melanoplus sanguinipes entomopoxvirus. VGAM15-HOST TARGET GENE is a human gene contained in the human genome.

[0171] VGAM15 GENE encodes a VGAM15 PRECURSOR RNA. Similar to other miRNA genes, and unlike most ordinary genes, the RNA transcribed by VGAM15, VGAM15 PRECURSOR RNA, does not encoded a protein.

[0172] VGAM15 PRECURSOR RNA folds onto itself, forming VGAM15 FOLDED PRECURSOR RNA. As FIG. 15 illustrates, VGAM15 FOLDED PRECURSOR RNA forms a ‘hairpin structure’, folding onto itself. As is well known in the art, this ‘hairpin structure’, is typical of RNA encoded by miRNA genes, and is due to the fact that the nucleotide sequence of the first half of the RNA encoded by a miRNA gene is an accurate or partial inversed-reversed sequence of the nucleotide sequence of the second half thereof. By “inversed-reversed” is meant a sequence which is reversed and wherein each nucleotide is replaced by a complimentary nucleotide, as is well known in the art (e.g. ATGGC is the inversed-reversed sequence of GCCAT).

[0173] An enzyme complex designated DICER COMPLEX, ‘dices’ the VGAM15 FOLDED PRECURSOR RNA into a single stranded ˜22 nt long RNA segment, designated VGAM15 RNA. As is known in the art, ‘dicing’ of a hairpin structured RNA precursor product into short a ˜22 nt RNA segment is catalyzed by an enzyme complex comprising an enzyme called Dicer together with other necessary proteins.

[0174] VGAM15-HOST TARGET GENE encodes a corresponding messenger RNA, designated VGAM15-HOST-TARGET RNA. VGAM15-HOST-TARGET RNA comprises three regions, as is typical of mRNA of a protein coding gene: a 5′ untranslated region, a protein coding region and a 3′ untranslated region, designated 5′UTR, PROTEIN CODING and 3′UTR respectively.

[0175] VGAM15 RNA binds complimentarily to a HOST BINDING SITE, located on an untranslated region of VGAM15-HOST-TARGET RNA. This complimentarily binding is due to the fact that the nucleotide sequence of VGAM15 RNA is an accurate or a partial inversed-reversed sequence of the nucleotide sequence of HOST BINDING SITE. It is appreciated that while FIG. 15A depicts the HOST BINDING SITE on the 3′UTR region, this is meant as an example only—the HOST BINDING SITE may be located on the 5′UTR region as well.

[0176] The complimentary binding of VGAM15 RNA to HOST BINDING SITE inhibits translation of VGAM15-HOST-TARGET RNA into VGAM15-HOST-TARGET PROTEIN. VGAM15-HOST-TARGET PROTEIN is therefore outlined by a broken line.

[0177] It is appreciated that VGAM15-HOST-TARGET GENE in fact represents a plurality of host target genes of VGAM15. The mRNA of each of this plurality of host target genes of VGAM15 comprises a HOST BINDING SITE, having a nucleotide sequence which is at least partly complementary to VGAM15 RNA, and which when bound by VGAM15 RNA causes inhibition of translation of one of a plurality of host target proteins of VGAM15. The plurality of host target genes of VGAM15 and their respective host binding sites, are described hereinbelow with reference to FIG. 15D.

[0178] It is appreciated by one skilled in the art that the mode of translational inhibition illustrated by FIG. 15A with specific reference to translational inhibition exerted by VGAM15 on one or more host target genes of VGAM15, is in fact common to other known miRNA genes. As mentioned hereinabove with reference to the background section, although a specific complimentary binding site has been demonstrated only for miRNA genes Lin-4 and Let-7, all other recently discovered miRNA genes are also believed by those skilled in the art to modulate expression of other genes by complimentary binding, although specific complimentary binding sites of these genes have not yet been found (Ruvkun G., ‘Perspective: Glimpses of a tiny RNA world’, Science 294, 779 (2001)).

[0179] It is further appreciated that a function of VGAM15 is inhibition of expression of host target genes, as part of a novel viral mechanism of attacking a host. Accordingly, utilities of VGAM15 include diagnosis, prevention and treatment of viral infection by Melanoplus sanguinipes entomopoxvirus.

[0180] Reference is now made to FIG. 15B which shows the nucleotide sequence of VGAM15 PRECURSOR RNA of FIG. 15A, designated SEQ ID:1, and a probable nucleotide sequence of VGAM15 RNA of FIG. 15A, designated SEQ ID:2. The nucleotide sequence of SEQ ID:2, which is highly likely (over 35%) to be identical or highly similar to that of VGAM15, is marked by an underline within the sequence of VGAM15 PRECURSOR RNA.

[0181] Reference is now made to FIG. 15C, which shows the secondary folding of VGAM15 PRECURSOR RNA, forming a ‘hairpin structure’ designated VGAM15 FOLDED PRECURSOR RNA, both of FIG. 15A. A probable (>35%) nucleotide sequence of VGAM15 RNA, designated SEQ ID:2 of FIG. 15B, is marked by an underline on VGAM15 FOLDED PRECURSOR RNA. It is appreciated that the complimentary base-paring is not perfect, with ‘bulges’, as is well known in the art with respect to the RNA folding of all known miRNA genes.

[0182] Reference is now made to FIG. 15D, which is a table showing binding sites found in untranslated regions of a plurality of host target genes of VGAM15, each binding site corresponding to HOST BINDING SITE of FIG. 15A, and their complementarity to SEQ ID:2, which is highly likely (>35%) to be identical or highly similar to the nucleotide sequence of VGAM15 RNA of FIG. 15A.

[0183] As mentioned hereinabove with reference to FIG. 15A a function of VGAM15 is inhibition of expression of host target genes, as part of a novel viral mechanism of attacking a host. Accordingly, utilities of VGAM15 include diagnosis, prevention and treatment of viral infection by Melanoplus sanguinipes entomopoxvirus. It is appreciated that specific functions, and accordingly utilities, of VGAM15 correlate with, and may be deduced from, the identity of the host target genes which VGAM15 binds and inhibits, and the function of these host target genes, as elaborated hereinbelow.

[0184] Reference is now made to KCNK4 BINDING SITE. potassium inwardly-rectifying channel, subfamily K, member 4 (KCNK4) is a host target gene of VGAM15, corresponding to VGAM15-HOST-TARGET GENE of FIG. 15A. KCNK4 BINDING SITE is a host binding site found in the 3′ untranslated region of KCNK4, corresponding to HOST BINDING SITE of FIG. 15A. FIG. 15D illustrates the complementarity of the nucleotide sequence of KCNK4 BINDING SITE, designated SEQ ID:3, to the nucleotide sequence of VGAM15 RNA of FIG. 15A, designated SEQ ID:2.

[0185] A function of VGAM15 is therefore inhibition of potassium inwardly-rectifying channel, subfamily K, member 4 (KCNK4), a host gene which encodes a Protein that is a voltage insensitive, instantaneous, outwardly rectifying potassium channel, as part of a novel viral mechanism used by Melanoplus sanguinipes entomopoxvirus for attacking a host. Accordingly, utilities of VGAM15 include diagnosis, prevention and treatment of viral infection by Melanoplus sanguinipes entomopoxvirus.

[0186] The function of KCNK4 has been established by previous studies. Potassium channels are functionally important to a large number of cellular processes including maintenance of the action potential, muscle contraction, hormone secretion, osmotic regulation, and ion flow. Mammalian potassium channels with 4 transmembrane segments and 2 pore (P2) domains in tandem form a distinct class of K+ channels. By database searching with sequences of known P2 domain K+ channels, Lesage et al. (2000) identified human sequences showing homology to the mouse P2 domain K+ channel Traak. Using degenerate PCR with primers based on these genomic sequences, Lesage et al. (2000) isolated a human P2 K+ channel cDNA, designated TRAAK or KCNK4, from a brain cDNA library. The deduced 393-amino acid protein shares 82% sequence identity with the mouse homolog. By RT-PCR, Lesage et al. (2000) demonstrated high expression of human KCNK4 in brain and placenta, with weak expression in testis, small intestine, prostate, and kidney. Mouse Kcnk4 is not expressed in placenta but, like the human transcript, is highly expressed only in neuronal tissues. Electrophysiologic studies in COS cells expressing KCNK4 indicated that human KCNK4 shares the same biophysical and pharmacologic properties as mouse TRAAK. KCNK4 currents are K+ selective, instantaneous, noninactivating, and outwardly rectifying. They are not sensitive to classic K+ channel blockers such as quinidine, TEA, and barium, but are potentiated by polyunsaturated fatty acids such as arachidonic acid. Lesage et al. (2000) determined that the KCNK4 gene contains 6 exons, with an intron in the first pore domain. The position of this intron is conserved in many P2 domain K+ channels, including some in C. elegans. By radiation hybrid analysis, Lesage et al. (2000) mapped the KCNK4 gene to chromosome 11q13, close to another P2 domain K+ channel, KCNK7 (603940).

[0187] Full details of the abovementioned studies are described in the following publications, the disclosure of which are hereby incorporated by reference:
[0188] Esage, F.; Maingret, F.; Lazdunski, M.: Cloning and expression of human TRAAK, a polyunsaturated fatty acids-activated and mechano-sensitive K+ channel. FEBS Lett. 471: 137-140, 2000.

[0189] Further studies establishing the function and utilities of KCNK4 are found in John Hopkins OMIM database record ID 605720, and in references numbered 1 listed hereinbelow.

[0190] Reference is now made to KCNK4 BINDING SITE. potassium inwardly-rectifying channel, subfamily K, member 4 (KCNK4) is a host target gene of VGAM15, corresponding to VGAM15-HOST-TARGET GENE of FIG. 15A. KCNK4 BINDING SITE is a host binding site found in the 3′ untranslated region of KCNK4, corresponding to HOST BINDING SITE of FIG. 15A. FIG. 15D illustrates the complementarity of the nucleotide sequence of KCNK4 BINDING SITE, designated SEQ ID:3, to the nucleotide sequence of VGAM15 RNA of FIG. 15A, designated SEQ ID:2.

[0191] A function of VGAM15 is therefore inhibition of potassium inwardly-rectifying channel, subfamily K, member 4 (KCNK4), a host gene which encodes a Protein that is a voltage insensitive, instantaneous, outwardly rectifying potassium channel, as part of a novel viral mechanism used by Melanoplus sanguinipes entomopoxvirus for attacking a host. Accordingly, utilities of VGAM15 include diagnosis, prevention and treatment of viral infection by Melanoplus sanguinipes entomopoxvirus.

[0192] The function of KCNK4 has been established by previous studies. Potassium channels are functionally important to a large number of cellular processes including maintenance of the action potential, muscle contraction, hormone secretion, osmotic regulation, and ion flow. Mammalian potassium channels with 4 transmembrane segments and 2 pore (P2) domains in tandem form a distinct class of K+ channels. By database searching with sequences of known P2 domain K+ channels, Lesage et al. (2000) identified human sequences showing homology to the mouse P2 domain K+ channel Traak. Using degenerate PCR with primers based on these genomic sequences, Lesage et al. (2000) isolated a human P2 K+ channel cDNA, designated TRAAK or KCNK4, from a brain cDNA library. The deduced 393-amino acid protein shares 82% sequence identity with the mouse homolog. By RT-PCR, Lesage et al. (2000) demonstrated high expression of human KCNK4 in brain and placenta, with weak expression in testis, small intestine, prostate, and kidney. Mouse Kcnk4 is not expressed in placenta but, like the human transcript, is highly expressed only in neuronal tissues. Electrophysiologic studies in COS cells expressing KCNK4 indicated that human KCNK4 shares the same biophysical and pharmacologic properties as mouse TRAAK. KCNK4 currents are K+ selective, instantaneous, noninactivating, and outwardly rectifying. They are not sensitive to classic K+ channel blockers such as quinidine, TEA, and barium, but are potentiated by polyunsaturated fatty acids such as arachidonic acid. Lesage et al. (2000) determined that the KCNK4 gene contains 6 exons, with an intron in the first pore domain. The position of this intron is conserved in many P2 domain K+ channels, including some in C. elegans. By radiation hybrid analysis, Lesage et al. (2000) mapped the KCNK4 gene to chromosome 11q13, close to another P2 domain K+ channel, KCNK7 (603940).

[0193] Full details of the abovementioned studies are described in the following publications, the disclosure of which are hereby incorporated by reference:
[0194] Esage, F.; Maingret, F.; Lazdunski, M.: Cloning and expression of human TRAAK, a polyunsaturated fatty acids-activated and mechano-sensitive K+ channel. FEBS Lett. 471: 137-140, 2000.

[0195] Further studies establishing the function and utilities of KCNK4 are found in John Hopkins OMIM database record ID 605720, and in references numbered 1 listed hereinbelow.

[0196] Reference is now made to KCNK4 BINDING SITE. potassium inwardly-rectifying channel, subfamily K, member 4 (KCNK4) is a host target gene of VGAM15, corresponding to VGAM15-HOST-TARGET GENE of FIG. 15A. KCNK4 BINDING SITE is a host binding site found in the 3′ untranslated region of KCNK4, corresponding to HOST BINDING SITE of FIG. 15A. FIG. 15D illustrates the complementarity of the nucleotide sequence of KCNK4 BINDING SITE, designated SEQ ID:3, to the nucleotide sequence of VGAM15 RNA of FIG. 15A, designated SEQ ID:2.

[0197] A function of VGAM15 is therefore inhibition of potassium inwardly-rectifying channel, subfamily K, member 4 (KCNK4), a host gene which encodes a Protein that is a voltage insensitive, instantaneous, outwardly rectifying potassium channel, as part of a novel viral mechanism used by Melanoplus sanguinipes entomopoxvirus for attacking a host. Accordingly, utilities of VGAM15 include diagnosis, prevention and treatment of viral infection by Melanoplus sanguinipes entomopoxvirus.

[0198] The function of KCNK4 has been established by previous studies. Potassium channels are functionally important to a large number of cellular processes including maintenance of the action potential, muscle contraction, hormone secretion, osmotic regulation, and ion flow. Mammalian potassium channels with 4 transmembrane segments and 2 pore (P2) domains in tandem form a distinct class of K+ channels. By database searching with sequences of known P2 domain K+ channels, Lesage et al. (2000) identified human sequences showing homology to the mouse P2 domain K+ channel Traak. Using degenerate PCR with primers based on these genomic sequences, Lesage et al. (2000) isolated a human P2 K+ channel cDNA, designated TRAAK or KCNK4, from a brain cDNA library. The deduced 393-amino acid protein shares 82% sequence identity with the mouse homolog. By RT-PCR, Lesage et al. (2000) demonstrated high expression of human KCNK4 in brain and placenta, with weak expression in testis, small intestine, prostate, and kidney. Mouse Kcnk4 is not expressed in placenta but, like the human transcript, is highly expressed only in neuronal tissues. Electrophysiologic studies in COS cells expressing KCNK4 indicated that human KCNK4 shares the same biophysical and pharmacologic properties as mouse TRAAK. KCNK4 currents are K+ selective, instantaneous, noninactivating, and outwardly rectifying. They are not sensitive to classic K+ channel blockers such as quinidine, TEA, and barium, but are potentiated by polyunsaturated fatty acids such as arachidonic acid. Lesage et al. (2000) determined that the KCNK4 gene contains 6 exons, with an intron in the first pore domain. The position of this intron is conserved in many P2 domain K+ channels, including some in C. elegans. By radiation hybrid analysis, Lesage et al. (2000) mapped the KCNK4 gene to chromosome 11q13, close to another P2 domain K+ channel, KCNK7 (603940).

[0199] Full details of the abovementioned studies are described in the following publications, the disclosure of which are hereby incorporated by reference:
[0200] Esage, F.; Maingret, F.; Lazdunski, M.: Cloning and expression of human TRAAK, a polyunsaturated fatty acids-activated and mechano-sensitive K+ channel. FEBS Lett. 471: 137-140, 2000.

[0201] Further studies establishing the function and utilities of KCNK4 are found in John Hopkins OMIM database record ID 605720, and in references numbered 1 listed hereinbelow.

[0202] Reference is now made to KCNK4 BINDING SITE. potassium inwardly-rectifying channel, subfamily K, member 4 (KCNK4) is a host target gene of VGAM15, corresponding to VGAM15-HOST-TARGET GENE of FIG. 15A. KCNK4 BINDING SITE is a host binding site found in the 3′ untranslated region of KCNK4, corresponding to HOST BINDING SITE of FIG. 15A. FIG. 15D illustrates the complementarity of the nucleotide sequence of KCNK4 BINDING SITE, designated SEQ ID:3, to the nucleotide sequence of VGAM15 RNA of FIG. 15A, designated SEQ ID:2.

[0203] A function of VGAM15 is therefore inhibition of potassium inwardly-rectifying channel, subfamily K, member 4 (KCNK4), a host gene which encodes a Protein that is a voltage insensitive, instantaneous, outwardly rectifying potassium channel, as part of a novel viral mechanism used by Melanoplus sanguinipes entomopoxvirus for attacking a host. Accordingly, utilities of VGAM15 include diagnosis, prevention and treatment of viral infection by Melanoplus sanguinipes entomopoxvirus.

[0204] The function of KCNK4 has been established by previous studies. Potassium channels are functionally important to a large number of cellular processes including maintenance of the action potential, muscle contraction, hormone secretion, osmotic regulation, and ion flow. Mammalian potassium channels with 4 transmembrane segments and 2 pore (P2) domains in tandem form a distinct class of K+ channels. By database searching with sequences of known P2 domain K+ channels, Lesage et al. (2000) identified human sequences showing homology to the mouse P2 domain K+ channel Traak. Using degenerate PCR with primers based on these genomic sequences, Lesage et al. (2000) isolated a human P2 K+ channel cDNA, designated TRAAK or KCNK4, from a brain cDNA library. The deduced 393-amino acid protein shares 82% sequence identity with the mouse homolog. By RT-PCR, Lesage et al. (2000) demonstrated high expression of human KCNK4 in brain and placenta, with weak expression in testis, small intestine, prostate, and kidney. Mouse Kcnk4 is not expressed in placenta but, like the human transcript, is highly expressed only in neuronal tissues. Electrophysiologic studies in COS cells expressing KCNK4 indicated that human KCNK4 shares the same biophysical and pharmacologic properties as mouse TRAAK. KCNK4 currents are K+ selective, instantaneous, noninactivating, and outwardly rectifying. They are not sensitive to classic K+ channel blockers such as quinidine, TEA, and barium, but are potentiated by polyunsaturated fatty acids such as arachidonic acid. Lesage et al. (2000) determined that the KCNK4 gene contains 6 exons, with an intron in the first pore domain. The position of this intron is conserved in many P2 domain K+ channels, including some in C. elegans. By radiation hybrid analysis, Lesage et al. (2000) mapped the KCNK4 gene to chromosome 11q13, close to another P2 domain K+ channel, KCNK7 (603940).

[0205] Full details of the abovementioned studies are described in the following publications, the disclosure of which are hereby incorporated by reference:
[0206] Esage, F.; Maingret, F.; Lazdunski, M.: Cloning and expression of human TRAAK, a polyunsaturated fatty acids-activated and mechano-sensitive K+ channel. FEBS Lett. 471: 137-140, 2000.

[0207] Further studies establishing the function and utilities of KCNK4 are found in John Hopkins OMIM database record ID 605720, and in references numbered 1 listed hereinbelow.

[0208] Reference is now made to KCNK4 BINDING SITE. potassium inwardly-rectifying channel, subfamily K, member 4 (KCNK4) is a host target gene of VGAM15, corresponding to VGAM15-HOST-TARGET GENE of FIG. 15A. KCNK4 BINDING SITE is a host binding site found in the 3′ untranslated region of KCNK4, corresponding to HOST BINDING SITE of FIG. 15A. FIG. 15D illustrates the complementarity of the nucleotide sequence of KCNK4 BINDING SITE, designated SEQ ID:3, to the nucleotide sequence of VGAM15 RNA of FIG. 15A, designated SEQ ID:2.

[0209] A function of VGAM15 is therefore inhibition of potassium inwardly-rectifying channel, subfamily K, member 4 (KCNK4), a host gene which encodes a Protein that is a voltage insensitive, instantaneous, outwardly rectifying potassium channel, as part of a novel viral mechanism used by Melanoplus sanguinipes entomopoxvirus for attacking a host. Accordingly, utilities of VGAM15 include diagnosis, prevention and treatment of viral infection by Melanoplus sanguinipes entomopoxvirus.

[0210] The function of KCNK4 has been established by previous studies. Potassium channels are functionally important to a large number of cellular processes including maintenance of the action potential, muscle contraction, hormone secretion, osmotic regulation, and ion flow. Mammalian potassium channels with 4 transmembrane segments and 2 pore (P2) domains in tandem form a distinct class of K+ channels. By database searching with sequences of known P2 domain K+ channels, Lesage et al. (2000) identified human sequences showing homology to the mouse P2 domain K+ channel Traak. Using degenerate PCR with primers based on these genomic sequences, Lesage et al. (2000) isolated a human P2 K+ channel cDNA, designated TRAAK or KCNK4, from a brain cDNA library. The deduced 393-amino acid protein shares 82% sequence identity with the mouse homolog. By RT-PCR, Lesage et al. (2000) demonstrated high expression of human KCNK4 in brain and placenta, with weak expression in testis, small intestine, prostate, and kidney. Mouse Kcnk4 is not expressed in placenta but, like the human transcript, is highly expressed only in neuronal tissues. Electrophysiologic studies in COS cells expressing KCNK4 indicated that human KCNK4 shares the same biophysical and pharmacologic properties as mouse TRAAK. KCNK4 currents are K+ selective, instantaneous, noninactivating, and outwardly rectifying. They are not sensitive to classic K+ channel blockers such as quinidine, TEA, and barium, but are potentiated by polyunsaturated fatty acids such as arachidonic acid. Lesage et al. (2000) determined that the KCNK4 gene contains 6 exons, with an intron in the first pore domain. The position of this intron is conserved in many P2 domain K+ channels, including some in C. elegans. By radiation hybrid analysis, Lesage et al. (2000) mapped the KCNK4 gene to chromosome 11q13, close to another P2 domain K+ channel, KCNK7 (603940).

[0211] Full details of the abovementioned studies are described in the following publications, the disclosure of which are hereby incorporated by reference:
[0212] Esage, F.; Maingret, F.; Lazdunski, M.: Cloning and expression of human TRAAK, a polyunsaturated fatty acids-activated and mechano-sensitive K+ channel. FEBS Lett. 471: 137-140, 2000.

[0213] Further studies establishing the function and utilities of KCNK4 are found in John Hopkins OMIM database record ID 605720, and in references numbered 1 listed hereinbelow.

[0214] Reference is now made to FIG. 16A, which is a simplified diagram providing a conceptual explanation of the mode by which a novel bioinformatically detected viral gene, referred to here as Viral Genomic Address Messenger 16 (VGAM16) modulates expression of host target genes thereof, the function and utility of which host target genes is known in the art.

[0215] VGAM16 is a novel bioinformatically detected regulatory, non protein coding, viral micro RNA (miRNA) gene. The method by which VGAM16 was detected is described hereinabove with reference to FIGS. 2-8.

[0216] VGAM16 GENE is a viral gene contained in the genome of Porcine adenovirus A. VGAM16-HOST TARGET GENE is a human gene contained in the human genome.

[0217] VGAM16 GENE encodes a VGAM16 PRECURSOR RNA. Similar to other miRNA genes, and unlike most ordinary genes, the RNA transcribed by VGAM16, VGAM16 PRECURSOR RNA, does not encoded a protein.

[0218] VGAM16 PRECURSOR RNA folds onto itself, forming VGAM16 FOLDED PRECURSOR RNA. As FIG. 16 illustrates, VGAM16 FOLDED PRECURSOR RNA forms a ‘hairpin structure’, folding onto itself. As is well known in the art, this ‘hairpin structure’, is typical of RNA encoded by miRNA genes, and is due to the fact that the nucleotide sequence of the first half of the RNA encoded by a miRNA gene is an accurate or partial inversed-reversed sequence of the nucleotide sequence of the second half thereof. By “inversed-reversed” is meant a sequence which is reversed and wherein each nucleotide is replaced by a complimentary nucleotide, as is well known in the art (e.g. ATGGC is the inversed-reversed sequence of GCCAT).

[0219] An enzyme complex designated DICER COMPLEX, ‘dices’ the VGAM16 FOLDED PRECURSOR RNA into a single stranded ˜22 nt long RNA segment, designated VGAM16 RNA. As is known in the art, ‘dicing’ of a hairpin structured RNA precursor product into short a ˜22 nt RNA segment is catalyzed by an enzyme complex comprising an enzyme called Dicer together with other necessary proteins.

[0220] VGAM16-HOST TARGET GENE encodes a corresponding messenger RNA, designated VGAM16-HOST-TARGET RNA. VGAM16-HOST-TARGET RNA comprises three regions, as is typical of mRNA of a protein coding gene: a 5′ untranslated region, a protein coding region and a 3′ untranslated region, designated 5′UTR, PROTEIN CODING and 3′UTR respectively.

[0221] VGAM16 RNA binds complimentarily to a HOST BINDING SITE, located on an untranslated region of VGAM16-HOST-TARGET RNA. This complimentarily binding is due to the fact that the nucleotide sequence of VGAM16 RNA is an accurate or a partial inversed-reversed sequence of the nucleotide sequence of HOST BINDING SITE. It is appreciated that while FIG. 16A depicts the HOST BINDING SITE on the 3′UTR region, this is meant as an example only—the HOST BINDING SITE may be located on the 5′UTR region as well.

[0222] The complimentary binding of VGAM16 RNA to HOST BINDING SITE inhibits translation of VGAM16-HOST-TARGET RNA into VGAM16-HOST-TARGET PROTEIN. VGAM16-HOST-TARGET PROTEIN is therefore outlined by a broken line.

[0223] It is appreciated that VGAM16-HOST-TARGET GENE in fact represents a plurality of host target genes of VGAM16. The mRNA of each of this plurality of host target genes of VGAM16 comprises a HOST BINDING SITE, having a nucleotide sequence which is at least partly complementary to VGAM16 RNA, and which when bound by VGAM16 RNA causes inhibition of translation of one of a plurality of host target proteins of VGAM16. The plurality of host target genes of VGAM16 and their respective host binding sites, are described hereinbelow with reference to FIG. 16D.

[0224] It is appreciated by one skilled in the art that the mode of translational inhibition illustrated by FIG. 16A with specific reference to translational inhibition exerted by VGAM16 on one or more host target genes of VGAM16, is in fact common to other known miRNA genes. As mentioned hereinabove with reference to the background section, although a specific complimentary binding site has been demonstrated only for miRNA genes Lin-4 and Let-7, all other recently discovered miRNA genes are also believed by those skilled in the art to modulate expression of other genes by complimentary binding, although specific complimentary binding sites of these genes have not yet been found (Ruvkun G., ‘Perspective: Glimpses of a tiny RNA world’, Science 294, 779 (2001)).

[0225] It is further appreciated that a function of VGAM16 is inhibition of expression of host target genes, as part of a novel viral mechanism of attacking a host. Accordingly, utilities of VGAM16 include diagnosis, prevention and treatment of viral infection by Porcine adenovirus A.

[0226] Reference is now made to FIG. 16B which shows the nucleotide sequence of VGAM16 PRECURSOR RNA of FIG. 16A, designated SEQ ID:8, and a probable nucleotide sequence of VGAM16 RNA of FIG. 16A, designated SEQ ID:9. The nucleotide sequence of SEQ ID: 9, which is highly likely (over 55%) to be identical or highly similar to that of VGAM16, is marked by an underline within the sequence of VGAM16 PRECURSOR RNA.

[0227] Reference is now made to FIG. 16C, which shows the secondary folding of VGAM16 PRECURSOR RNA, forming a ‘hairpin structure’ designated VGAM16 FOLDED PRECURSOR RNA, both of FIG. 16A. A probable (>55%) nucleotide sequence of VGAM16 RNA, designated SEQ ID:9 of FIG. 16B, is marked by an underline on VGAM16 FOLDED PRECURSOR RNA. It is appreciated that the complimentary base-paring is not perfect, with ‘bulges’, as is well known in the art with respect to the RNA folding of all known miRNA genes.

[0228] Reference is now made to FIG. 16D, which is a table showing binding sites found in untranslated regions of a plurality of host target genes of VGAM16, each binding site corresponding to HOST BINDING SITE of FIG. 16A, and their complementarity to SEQ ID:9, which is highly likely (>55%) to be identical or highly similar to the nucleotide sequence of VGAM16 RNA of FIG. 16A.

[0229] As mentioned hereinabove with reference to FIG. 16A a function of VGAM16 is inhibition of expression of host target genes, as part of a novel viral mechanism of attacking a host. Accordingly, utilities of VGAM16 include diagnosis, prevention and treatment of viral infection by Porcine adenovirus A. It is appreciated that specific functions, and accordingly utilities, of VGAM16 correlate with, and may be deduced from, the identity of the host target genes which VGAM16 binds and inhibits, and the function of these host target genes, as elaborated hereinbelow.

[0230] Reference is now made to DUOX1 BINDING SITE. dual oxidase 1 (DUOX1) is a host target gene of VGAM16, corresponding to VGAM16-HOST-TARGET GENE of FIG. 16A. DUOX1 BINDING SITE is a host binding site found in the 3′ untranslated region of DUOX1, corresponding to HOST BINDING SITE of FIG. 16A. FIG. 16D illustrates the complementarity of the nucleotide sequence of DUOX1 BINDING SITE, designated SEQ ID:10, to the nucleotide sequence of VGAM16 RNA of FIG. 16A, designated SEQ ID:9.

[0231] A function of VGAM16 is therefore inhibition of dual oxidase 1 (DUOX1), a host gene which encodes a Protein that is a component of the thyroid hydrogen peroxide generating system, as part of a novel viral mechanism used by Porcine adenovirus A for attacking a host. Accordingly, utilities of VGAM16 include diagnosis, prevention and treatment of viral infection by Porcine adenovirus A.

[0232] The function of DUOX1 has been established by previous studies. Using a probe for a leukocyte NADPH oxidase, De Deken et al. (2000) cloned a full-length DUOX1 cDNA from a primary human thyroid cell cDNA library. The deduced 1,551-amino acid protein has a calculated molecular mass of 177 kD. It contains several domains characteristic of flavoproteins including NADPH- and FAD-binding domains, and 4 specific histidines and a conserved arginine predicted to bind a heme prosthetic group. DUOX2 also contains 2 EF-hand motifs, 4 putative N-glycosylation sites, and 7 hydrophobic stretches. It shares 83% and 53% sequence similarity with DUOX2 and gp91-phox (306400), respectively, and significant similarity to other NADPH oxidases. DUOX1 and DUOX2 share 53% and 61% sequence similarity, respectively, with a predicted protein in C. elegans. Northern blot analysis detected expression of a 5.7-kb DUOX1 transcript in cultured human thymocytes. Immunolocalization studies demonstrated that DUOX1 colocalizes with thyroperoxidase at the supranuclear apical pole of all thyroid cells. De Deken et al. (2000) detected upregulated expression of DUOX1 and DUOX2 mRNA in cultured human thymocytes stimulated with cAMP agonists. In a study of thyroid carcinomas, Lacroix et al. (2001) showed that levels of DUOX1 and DUOX2 were maintained in parallel and were more frequently seen in neoplastic tissues expressing other thyroid differentiation markers.

[0233] Full details of the abovementioned studies are described in the following publications, the disclosure of which are hereby incorporated by reference:
[0234] Deken, X.; Wang, D.; Many, M.-C.; Costagliola, S.; Libert, F.; Vassart, G.; Dumont, J. E.; Miot, F.: Cloning of two human thyroid cDNAs encoding new members of the NADPH oxidase family. J. Biol. Chem. 275: 23227-23233, 2000. PubMed ID: 10806195 2. Lacroix, L.; Nocera, M.; Mian, C.; Caillou, B.; Virion, A.; Dupuy, C.; Filetti, S.; Bidart, J. M.; Schlumberger, M.: Expression of nicotinamide adenine dinucleotide phosphate oxidase flavoprotein DUOX genes and proteins in human papillary and follicular thyroid carcinomas. Thyroid 11: 1017-1023, 2001.

[0235] Further studies establishing the function and utilities of DUOX1 are found in John Hopkins OMIM database record ID 606758, and in references numbered 2-3 listed hereinbelow.

[0236] Reference is now made to EPHA8 BINDING SITE. EphA8 (EPHA8) is a host target gene of VGAM16, corresponding to VGAM16-HOST TARGET GENE of FIG. 16A. EPHA8 BINDING SITE is a host binding site found in the 3′ untranslated region of EPHA8, corresponding to HOST BINDING SITE of FIG. 16A. FIG. 16D illustrates the complementarity of the nucleotide sequence of EPHA8 BINDING SITE, designated SEQ ID:11, to the nucleotide sequence of VGAM16 RNA of FIG. 16A, designated SEQ ID:9.

[0237] Yet another function of VGAM16 is therefore inhibition of EphA8 (EPHA8), a host gene which encodes a receptor that Eph-related receptor tyrosine kinase A8, as part of a novel viral mechanism used by Porcine adenovirus A for attacking a host. Accordingly, utilities of VGAM16 include diagnosis, prevention and treatment of viral infection by Porcine adenovirus A.

[0238] The function of EPHA8 has been established by previous studies. See EPH (EPHA1; 179610) for background on Eph receptors and their ligands, the ephrins. Chan and Watt (1991) identified human and rat DNAs encoding 2 novel members of the EPH subclass of putative receptor protein-tyrosine kinases. Rat cDNA clones encoding EEK (EPH- and ELK-related kinase) were isolated from a brain cDNA library probed with DNA encoding the kinase region of the insulin receptor-related receptor (INSRR; 147671). The EEK protein was predicted to contain all the amino acid residues conserved in the catalytic domains of protein-tyrosine kinases and was most similar to 2 putative receptor protein-tyrosine kinases of the EPH subclass, ELK (EPHB1; 600600) and EPH, showing 69 and 57% identity, respectively. Human genomic DNAs, encoding part of EEK as well as another putative protein tyrosine kinase most similar to ELK (90%) and symbolized ERK (EPHB2; 600997) for ELK-related kinase, were isolated and partially characterized. The novel identity of these 2 EPH-family genes was further supported by Southern blot analysis and localization to human chromosome 1. In Northern blot analysis of rat RNA, DNAs encoding rat EEK and human ERK hybridized to transcripts most abundant in brain and lung, respectively. These 2 new members of the EPH subclass of receptor protein-tyrosine kinases, EEK and ERK, may therefore have tissue-specific functions distinct from those of the other EPH family members.

[0239] Animal model experiments lend further support to the function of EPHA8. Park et al. (1997) generated mice homozygous for a mutation that disrupts the gene encoding EPHA8, a member of the Eph family of tyrosine proteinase receptors. EphA8−/− mice developed to term, were fertile, and did not display obvious anatomical or physiologic defects.

[0240] It is appreciated that the abovementioned animal model for EPHA8 is acknowledged by those skilled in the art as a scientifically valid animal model, as can be further appreciated from the publications sited hereinbelow.

[0241] Full details of the abovementioned studies are described in the following publications, the disclosure of which are hereby incorporated by reference:
[0242] Han, J.; Watt, V. M.: Eek and erk, new members of the eph subclass of receptor protein-tyrosine kinases. Oncogene 6: 1057-1061, 1991. PubMed ID: 1648701 2. Park, S.; Frisen, J.; Barbacid, M.: Aberrant axonal projections in mice lacking EphA8 (Eek) tyrosine protein kinase receptors. EMBO J. 16: 3106-3114, 1997.

[0243] Further studies establishing the function and utilities of EPHA8 are found in John Hopkins OMIM database record ID 176945, and in references numbered 4-5 listed hereinbelow.

[0244] Reference is now made to UBE2H BINDING SITE. ubiquitin-conjugating enzyme E2H (homologous to yeast UBC8) (UBE2H) is a host target gene of VGAM16, corresponding to VGAM16-HOST-TARGET GENE of FIG. 16A. UBE2H BINDING SITE is a host binding site found in the 3′ untranslated region of UBE2H, corresponding to HOST BINDING SITE of FIG. 16A. FIG. 16D illustrates the complementarity of the nucleotide sequence of UBE2H BINDING SITE, designated SEQ ID:12, to the nucleotide sequence of VGAM16 RNA of FIG. 16A, designated SEQ ID:9.

[0245] An additional function of VGAM16 is therefore inhibition of ubiquitin-conjugating enzyme E2H (homologous to yeast UBC8) (UBE2H), a host gene which encodes a Enzyme that catalyzes the covalent attachment of ubiquitin to other proteins, as part of a novel viral mechanism used by Porcine adenovirus A for attacking a host. Accordingly, utilities of VGAM16 include diagnosis, prevention and treatment of viral infection by Porcine adenovirus A.

[0246] The function of UBE2H has been established by previous studies. Ubiquitin-conjugating enzymes catalyze the covalent attachment of ubiquitin to cellular substrates. Kaiser et al. (1994) isolated a novel ubiquitin-conjugating enzyme from human placenta and cloned the corresponding cDNA. DNA sequencing revealed that this gene, symbolized UBCH2 by them, encodes a protein with significant sequence similarity to yeast UBC8. They discovered that yeast UBC8 is interrupted by a single intron bearing an unusual branch point sequence. The authors noted that yeast UBC8 exhibited 54% amino acid sequence identity to human UBCH2. Moreover, full-length yeast and human enzymes expressed from the cDNAs showed similar enzymatic activities in vitro by catalyzing the ubiquitination of histones, suggesting that the 2 enzymes may fulfill similar functions in vivo. By study of hamster/human hybrid cell DNAs, Kaiser et al. (1994) demonstrated that the human UBC8 gene is located on chromosome 7. Hayashida et al. (2000) constructed a 1-Mb physical and transcript map of 7q32 and mapped UBE2H to a region between D7S530 and D7S649.

[0247] Full details of the abovementioned studies are described in the following publications, the disclosure of which are hereby incorporated by reference:
[0248] Ayashida, S.; Yamasaki, K.; Asada, Y.; Soeda, E.; Niikawa, N.; Kishino, T.: Construction of a physical and transcript map flanking the imprinted MEST/PEG1 region at 7q32. Genomics 66: 221-225, 2000. PubMed ID: 10860668 2. Kaiser, P.; Seufert, W.; Hofferer, L.; Kofler, B.; Sachsenmaier, C.; Herzog, H.; Jentsch, S.; Schweiger, M.; Schneider, R.: Human ubiquitin-conjugating enzyme homologous to yeast UBC8. J. Biol. Chem. 269: 8797-8802, 1994.

[0249] Further studies establishing the function and utilities of UBE2H are found in John Hopkins OMIM database record ID 601082, and in references numbered 6-7 listed hereinbelow.

[0250] Reference is now made to UBE2H BINDING SITE. ubiquitin-conjugating enzyme E2H (homologous to yeast UBC8) (UBE2H) is a host target gene of VGAM16, corresponding to VGAM16-HOST-TARGET GENE of FIG. 16A. UBE2H BINDING SITE is a host binding site found in the 3′ untranslated region of UBE2H, corresponding to HOST BINDING SITE of FIG. 16A. FIG. 16D illustrates the complementarity of the nucleotide sequence of UBE2H BINDING SITE, designated SEQ ID:12, to the nucleotide sequence of VGAM16 RNA of FIG. 16A, designated SEQ ID:9.

[0251] An additional function of VGAM16 is therefore inhibition of ubiquitin-conjugating enzyme E2H (homologous to yeast UBC8) (UBE2H), a host gene which encodes a Enzyme that catalyzes the covalent attachment of ubiquitin to other proteins, as part of a novel viral mechanism used by Porcine adenovirus A for attacking a host. Accordingly, utilities of VGAM16 include diagnosis, prevention and treatment of viral infection by Porcine adenovirus A.

[0252] The function of UBE2H has been established by previous studies. Ubiquitin-conjugating enzymes catalyze the covalent attachment of ubiquitin to cellular substrates. Kaiser et al. (1994) isolated a novel ubiquitin-conjugating enzyme from human placenta and cloned the corresponding cDNA. DNA sequencing revealed that this gene, symbolized UBCH2 by them, encodes a protein with significant sequence similarity to yeast UBC8. They discovered that yeast UBC8 is interrupted by a single intron bearing an unusual branch point sequence. The authors noted that yeast UBC8 exhibited 54% amino acid sequence identity to human UBCH2. Moreover, full-length yeast and human enzymes expressed from the cDNAs showed similar enzymatic activities in vitro by catalyzing the ubiquitination of histones, suggesting that the 2 enzymes may fulfill similar functions in vivo. By study of hamster/human hybrid cell DNAs, Kaiser et al. (1994) demonstrated that the human UBC8 gene is located on chromosome 7. Hayashida et al. (2000) constructed a 1-Mb physical and transcript map of 7q32 and mapped UBE2H to a region between D7S530 and D7S649.

[0253] Full details of the abovementioned studies are described in the following publications, the disclosure of which are hereby incorporated by reference:
[0254] Ayashida, S.; Yamasaki, K.; Asada, Y.; Soeda, E.; Niikawa, N.; Kishino, T.: Construction of a physical and transcript map flanking the imprinted MEST/PEG1 region at 7q32. Genomics 66: 221-225, 2000. PubMed ID: 10860668 2. Kaiser, P.; Seufert, W.; Hofferer, L.; Kofler, B.; Sachsenmaier, C.; Herzog, H.; Jentsch, S.; Schweiger, M.; Schneider, R.: Human ubiquitin-conjugating enzyme homologous to yeast UBC8. J. Biol. Chem. 269: 8797-8802, 1994.

[0255] Further studies establishing the function and utilities of UBE2H are found in John Hopkins OMIM database record ID 601082, and in references numbered 6-7 listed hereinbelow.

[0256] Reference is now made to UBE2H BINDING SITE. ubiquitin-conjugating enzyme E2H (homologous to yeast UBC8) (UBE2H) is a host target gene of VGAM16, corresponding to VGAM16-HOST-TARGET GENE of FIG. 16A. UBE2H BINDING SITE is a host binding site found in the 3′ untranslated region of UBE2H, corresponding to HOST BINDING SITE of FIG. 16A. FIG. 16D illustrates the complementarity of the nucleotide sequence of UBE2H BINDING SITE, designated SEQ ID:12, to the nucleotide sequence of VGAM16 RNA of FIG. 16A, designated SEQ ID:9.

[0257] An additional function of VGAM16 is therefore inhibition of ubiquitin-conjugating enzyme E2H (homologous to yeast UBC8) (UBE2H), a host gene which encodes a Enzyme that catalyzes the covalent attachment of ubiquitin to other proteins, as part of a novel viral mechanism used by Porcine adenovirus A for attacking a host. Accordingly, utilities of VGAM16 include diagnosis, prevention and treatment of viral infection by Porcine adenovirus A.

[0258] The function of UBE2H has been established by previous studies. Ubiquitin-conjugating enzymes catalyze the covalent attachment of ubiquitin to cellular substrates. Kaiser et al. (1994) isolated a novel ubiquitin-conjugating enzyme from human placenta and cloned the corresponding cDNA. DNA sequencing revealed that this gene, symbolized UBCH2 by them, encodes a protein with significant sequence similarity to yeast UBC8. They discovered that yeast UBC8 is interrupted by a single intron bearing an unusual branch point sequence. The authors noted that yeast UBC8 exhibited 54% amino acid sequence identity to human UBCH2. Moreover, full-length yeast and human enzymes expressed from the cDNAs showed similar enzymatic activities in vitro by catalyzing the ubiquitination of histones, suggesting that the 2 enzymes may fulfill similar functions in vivo. By study of hamster/human hybrid cell DNAs, Kaiser et al. (1994) demonstrated that the human UBC8 gene is located on chromosome 7. Hayashida et al. (2000) constructed a 1-Mb physical and transcript map of 7q32 and mapped UBE2H to a region between D7S530 and D7S649.

[0259] Full details of the abovementioned studies are described in the following publications, the disclosure of which are hereby incorporated by reference:
[0260] Aashida, S.; Yamasaki, K.; Asada, Y.; Soeda, E.; Niikawa, N.; Kishino, T.: Construction of a physical and transcript map flanking the imprinted MEST/PEG1 region at 7q32. Genomics 66: 221-225, 2000. PubMed ID: 10860668 2. Kaiser, P.; Seufert, W.; Hofferer, L.; Kofler, B.; Sachsenmaier, C.; Herzog, H.; Jentsch, S.; Schweiger, M.; Schneider, R.: Human ubiquitin-conjugating enzyme homologous to yeast UBC8. J. Biol. Chem. 269: 8797-8802, 1994.

[0261] Further studies establishing the function and utilities of UBE2H are found in John Hopkins OMIM database record ID 601082, and in references numbered 6-7 listed hereinbelow.

[0262] Reference is now made to UBE2H BINDING SITE. ubiquitin-conjugating enzyme E2H (homologous to yeast UBC8) (UBE2H) is a host target gene of VGAM16, corresponding to VGAM16-HOST-TARGET GENE of FIG. 16A. UBE2H BINDING SITE is a host binding site found in the 3′ untranslated region of UBE2H, corresponding to HOST BINDING SITE of FIG. 16A. FIG. 16D illustrates the complementarity of the nucleotide sequence of UBE2H BINDING SITE, designated SEQ ID:12, to the nucleotide sequence of VGAM16 RNA of FIG. 16A, designated SEQ ID:9.

[0263] An additional function of VGAM16 is therefore inhibition of ubiquitin-conjugating enzyme E2H (homologous to yeast UBC8) (UBE2H), a host gene which encodes a Enzyme that catalyzes the covalent attachment of ubiquitin to other proteins, as part of a novel viral mechanism used by Porcine adenovirus A for attacking a host. Accordingly, utilities of VGAM16 include diagnosis, prevention and treatment of viral infection by Porcine adenovirus A.

[0264] The function of UBE2H has been established by previous studies. Ubiquitin-conjugating enzymes catalyze the covalent attachment of ubiquitin to cellular substrates. Kaiser et al. (1994) isolated a novel ubiquitin-conjugating enzyme from human placenta and cloned the corresponding cDNA. DNA sequencing revealed that this gene, symbolized UBCH2 by them, encodes a protein with significant sequence similarity to yeast UBC8. They discovered that yeast UBC8 is interrupted by a single intron bearing an unusual branch point sequence. The authors noted that yeast UBC8 exhibited 54% amino acid sequence identity to human UBCH2. Moreover, full-length yeast and human enzymes expressed from the cDNAs showed similar enzymatic activities in vitro by catalyzing the ubiquitination of histones, suggesting that the 2 enzymes may fulfill similar functions in vivo. By study of hamster/human hybrid cell DNAs, Kaiser et al. (1994) demonstrated that the human UBC8 gene is located on chromosome 7. Hayashida et al. (2000) constructed a 1-Mb physical and transcript map of 7q32 and mapped UBE2H to a region between D7S530 and D7S649.

[0265] Full details of the abovementioned studies are described in the following publications, the disclosure of which are hereby incorporated by reference:
[0266] Ayashida, S.; Yamasaki, K.; Asada, Y.; Soeda, E.; Niikawa, N.; Kishino, T.: Construction of a physical and transcript map flanking the imprinted MEST/PEG1 region at 7q32. Genomics 66: 221-225, 2000. PubMed ID: 10860668 2. Kaiser, P.; Seufert, W.; Hofferer, L.; Kofler, B.; Sachsenmaier, C.; Herzog, H.; Jentsch, S.; Schweiger, M.; Schneider, R.: Human ubiquitin-conjugating enzyme homologous to yeast UBC8. J. Biol. Chem. 269: 8797-8802, 1994.

[0267] Further studies establishing the function and utilities of UBE2H are found in John Hopkins OMIM database record ID 601082, and in references numbered 6-7 listed hereinbelow.

[0268] Reference is now made to UBE2H BINDING SITE. ubiquitin-conjugating enzyme E2H (homologous to yeast UBC8) (UBE2H) is a host target gene of VGAM16, corresponding to VGAM16-HOST-TARGET GENE of FIG. 16A. UBE2H BINDING SITE is a host binding site found in the 3′ untranslated region of UBE2H, corresponding to HOST BINDING SITE of FIG. 16A. FIG. 16D illustrates the complementarity of the nucleotide sequence of UBE2H BINDING SITE, designated SEQ ID:12, to the nucleotide sequence of VGAM16 RNA of FIG. 16A, designated SEQ ID:9.

[0269] An additional function of VGAM16 is therefore inhibition of ubiquitin-conjugating enzyme E2H (homologous to yeast UBC8) (UBE2H), a host gene which encodes a Enzyme that catalyzes the covalent attachment of ubiquitin to other proteins, as part of a novel viral mechanism used by Porcine adenovirus A for attacking a host. Accordingly, utilities of VGAM16 include diagnosis, prevention and treatment of viral infection by Porcine adenovirus A.

[0270] The function of UBE2H has been established by previous studies. Ubiquitin-conjugating enzymes catalyze the covalent attachment of ubiquitin to cellular substrates. Kaiser et al. (1994) isolated a novel ubiquitin-conjugating enzyme from human placenta and cloned the corresponding cDNA. DNA sequencing revealed that this gene, symbolized UBCH2 by them, encodes a protein with significant sequence similarity to yeast UBC8. They discovered that yeast UBC8 is interrupted by a single intron bearing an unusual branch point sequence. The authors noted that yeast UBC8 exhibited 54% amino acid sequence identity to human UBCH2. Moreover, full-length yeast and human enzymes expressed from the cDNAs showed similar enzymatic activities in vitro by catalyzing the ubiquitination of histones, suggesting that the 2 enzymes may fulfill similar functions in vivo. By study of hamster/human hybrid cell DNAs, Kaiser et al. (1994) demonstrated that the human UBC8 gene is located on chromosome 7. Hayashida et al. (2000) constructed a 1-Mb physical and transcript map of 7q32 and mapped UBE2H to a region between D7S530 and D7S649.

[0271] Full details of the abovementioned studies are described in the following publications, the disclosure of which are hereby incorporated by reference:
[0272] Ayashida, S.; Yamasaki, K.; Asada, Y.; Soeda, E.; Niikawa, N.; Kishino, T.: Construction of a physical and transcript map flanking the imprinted MEST/PEG1 region at 7q32. Genomics 66: 221-225, 2000. PubMed ID: 10860668 2. Kaiser, P.; Seufert, W.; Hofferer, L.; Kofler, B.; Sachsenmaier, C.; Herzog, H.; Jentsch, S.; Schweiger, M.; Schneider, R.: Human ubiquitin-conjugating enzyme homologous to yeast UBC8. J. Biol. Chem. 269: 8797-8802, 1994.

[0273] Further studies establishing the function and utilities of UBE2H are found in John Hopkins OMIM database record ID 601082, and in references numbered 6-7 listed hereinbelow.

[0274] Reference is now made to UBE2H BINDING SITE. ubiquitin-conjugating enzyme E2H (homologous to yeast UBC8) (UBE2H) is a host target gene of VGAM16, corresponding to VGAM16-HOST-TARGET GENE of FIG. 16A. UBE2H BINDING SITE is a host binding site found in the 3′ untranslated region of UBE2H, corresponding to HOST BINDING SITE of FIG. 16A. FIG. 16D illustrates the complementarity of the nucleotide sequence of UBE2H BINDING SITE, designated SEQ ID:12, to the nucleotide sequence of VGAM16 RNA of FIG. 16A, designated SEQ ID:9.

[0275] An additional function of VGAM16 is therefore inhibition of ubiquitin-conjugating enzyme E2H (homologous to yeast UBC8) (UBE2H), a host gene which encodes a Enzyme that catalyzes the covalent attachment of ubiquitin to other proteins, as part of a novel viral mechanism used by Porcine adenovirus A for attacking a host. Accordingly, utilities of VGAM16 include diagnosis, prevention and treatment of viral infection by Porcine adenovirus A.

[0276] The function of UBE2H has been established by previous studies. Ubiquitin-conjugating enzymes catalyze the covalent attachment of ubiquitin to cellular substrates. Kaiser et al. (1994) isolated a novel ubiquitin-conjugating enzyme from human placenta and cloned the corresponding cDNA. DNA sequencing revealed that this gene, symbolized UBCH2 by them, encodes a protein with significant sequence similarity to yeast UBC8. They discovered that yeast UBC8 is interrupted by a single intron bearing an unusual branch point sequence. The authors noted that yeast UBC8 exhibited 54% amino acid sequence identity to human UBCH2. Moreover, full-length yeast and human enzymes expressed from the cDNAs showed similar enzymatic activities in vitro by catalyzing the ubiquitination of histones, suggesting that the 2 enzymes may fulfill similar functions in vivo. By study of hamster/human hybrid cell DNAs, Kaiser et al. (1994) demonstrated that the human UBC8 gene is located on chromosome 7. Hayashida et al. (2000) constructed a 1-Mb physical and transcript map of 7q32 and mapped UBE2H to a region between D7S530 and D7S649.

[0277] Full details of the abovementioned studies are described in the following publications, the disclosure of which are hereby incorporated by reference:
[0278] Ayashida, S.; Yamasaki, K.; Asada, Y.; Soeda, E.; Niikawa, N.; Kishino, T.: Construction of a physical and transcript map flanking the imprinted MEST/PEG1 region at 7q32. Genomics 66: 221-225, 2000. PubMed ID: 10860668 2. Kaiser, P.; Seufert, W.; Hofferer, L.; Kofler, B.; Sachsenmaier, C.; Herzog, H.; Jentsch, S.; Schweiger, M.; Schneider, R.: Human ubiquitin-conjugating enzyme homologous to yeast UBC8. J. Biol. Chem. 269: 8797-8802, 1994.

[0279] Further studies establishing the function and utilities of UBE2H are found in John Hopkins OMIM database record ID 601082, and in references numbered 6-7 listed hereinbelow.

[0280] Reference is now made to UBE2H BINDING SITE. ubiquitin-conjugating enzyme E2H (homologous to yeast UBC8) (UBE2H) is a host target gene of VGAM16, corresponding to VGAM16-HOST-TARGET GENE of FIG. 16A. UBE2H BINDING SITE is a host binding site found in the 3′ untranslated region of UBE2H, corresponding to HOST BINDING SITE of FIG. 16A. FIG. 16D illustrates the complementarity of the nucleotide sequence of UBE2H BINDING SITE, designated SEQ ID:12, to the nucleotide sequence of VGAM16 RNA of FIG. 16A, designated SEQ ID:9.

[0281] An additional function of VGAM16 is therefore inhibition of ubiquitin-conjugating enzyme E2H (homologous to yeast UBC8) (UBE2H), a host gene which encodes a Enzyme that catalyzes the covalent attachment of ubiquitin to other proteins, as part of a novel viral mechanism used by Porcine adenovirus A for attacking a host. Accordingly, utilities of VGAM16 include diagnosis, prevention and treatment of viral infection by Porcine adenovirus A.

[0282] The function of UBE2H has been established by previous studies. Ubiquitin-conjugating enzymes catalyze the covalent attachment of ubiquitin to cellular substrates. Kaiser et al. (1994) isolated a novel ubiquitin-conjugating enzyme from human placenta and cloned the corresponding cDNA. DNA sequencing revealed that this gene, symbolized UBCH2 by them, encodes a protein with significant sequence similarity to yeast UBC8. They discovered that yeast UBC8 is interrupted by a single intron bearing an unusual branch point sequence. The authors noted that yeast UBC8 exhibited 54% amino acid sequence identity to human UBCH2. Moreover, full-length yeast and human enzymes expressed from the cDNAs showed similar enzymatic activities in vitro by catalyzing the ubiquitination of histones, suggesting that the 2 enzymes may fulfill similar functions in vivo. By study of hamster/human hybrid cell DNAs, Kaiser et al. (1994) demonstrated that the human UBC8 gene is located on chromosome 7. Hayashida et al. (2000) constructed a 1-Mb physical and transcript map of 7q32 and mapped UBE2H to a region between D7S530 and D7S649.

[0283] Full details of the abovementioned studies are described in the following publications, the disclosure of which are hereby incorporated by reference:
[0284] Ayashida, S.; Yamasaki, K.; Asada, Y.; Soeda, E.; Niikawa, N.; Kishino, T.: Construction of a physical and transcript map flanking the imprinted MEST/PEG1 region at 7q32. Genomics 66: 221-225, 2000. PubMed ID: 10860668 2. Kaiser, P.; Seufert, W.; Hofferer, L.; Kofler, B.; Sachsenmaier, C.; Herzog, H.; Jentsch, S.; Schweiger, M.; Schneider, R.: Human ubiquitin-conjugating enzyme homologous to yeast UBC8. J. Biol. Chem. 269: 8797-8802, 1994.

[0285] Further studies establishing the function and utilities of UBE2H are found in John Hopkins OMIM database record ID 601082, and in references numbered 6-7 listed hereinbelow.

[0286] Reference is now made to UBE2H BINDING SITE. ubiquitin-conjugating enzyme E2H (homologous to yeast UBC8) (UBE2H) is a host target gene of VGAM16, corresponding to VGAM16-HOST-TARGET GENE of FIG. 16A. UBE2H BINDING SITE is a host binding site found in the 3′ untranslated region of UBE2H, corresponding to HOST BINDING SITE of FIG. 16A. FIG. 16D illustrates the complementarity of the nucleotide sequence of UBE2H BINDING SITE, designated SEQ ID:12, to the nucleotide sequence of VGAM16 RNA of FIG. 16A, designated SEQ ID:9.

[0287] An additional function of VGAM16 is therefore inhibition of ubiquitin-conjugating enzyme E2H (homologous to yeast UBC8) (UBE2H), a host gene which encodes a Enzyme that catalyzes the covalent attachment of ubiquitin to other proteins, as part of a novel viral mechanism used by Porcine adenovirus A for attacking a host. Accordingly, utilities of VGAM16 include diagnosis, prevention and treatment of viral infection by Porcine adenovirus A.

[0288] The function of UBE2H has been established by previous studies. Ubiquitin-conjugating enzymes catalyze the covalent attachment of ubiquitin to cellular substrates. Kaiser et al. (1994) isolated a novel ubiquitin-conjugating enzyme from human placenta and cloned the corresponding cDNA. DNA sequencing revealed that this gene, symbolized UBCH2 by them, encodes a protein with significant sequence similarity to yeast UBC8. They discovered that yeast UBC8 is interrupted by a single intron bearing an unusual branch point sequence. The authors noted that yeast UBC8 exhibited 54% amino acid sequence identity to human UBCH2. Moreover, full-length yeast and human enzymes expressed from the cDNAs showed similar enzymatic activities in vitro by catalyzing the ubiquitination of histones, suggesting that the 2 enzymes may fulfill similar functions in vivo. By study of hamster/human hybrid cell DNAs, Kaiser et al. (1994) demonstrated that the human UBC8 gene is located on chromosome 7. Hayashida et al. (2000) constructed a 1-Mb physical and transcript map of 7q32 and mapped UBE2H to a region between D7S530 and D7S649.

[0289] Full details of the abovementioned studies are described in the following publications, the disclosure of which are hereby incorporated by reference:
[0290] Ayashida, S.; Yamasaki, K.; Asada, Y.; Soeda, E.; Niikawa, N.; Kishino, T.: Construction of a physical and transcript map flanking the imprinted MEST/PEG1 region at 7q32. Genomics 66: 221-225, 2000. PubMed ID: 10860668 2. Kaiser, P.; Seufert, W.; Hofferer, L.; Kofler, B.; Sachsenmaier, C.; Herzog, H.; Jentsch, S.; Schweiger, M.; Schneider, R.: Human ubiquitin-conjugating enzyme homologous to yeast UBC8. J. Biol. Chem. 269: 8797-8802, 1994.

[0291] Further studies establishing the function and utilities of UBE2H are found in John Hopkins OMIM database record ID 601082, and in references numbered 6-7 listed hereinbelow.

[0292] Reference is now made to UBE2H BINDING SITE. ubiquitin-conjugating enzyme E2H (homologous to yeast UBC8) (UBE2H) is a host target gene of VGAM16, corresponding to VGAM16-HOST-TARGET GENE of FIG. 16A. UBE2H BINDING SITE is a host binding site found in the 3′ untranslated region of UBE2H, corresponding to HOST BINDING SITE of FIG. 16A. FIG. 16D illustrates the complementarity of the nucleotide sequence of UBE2H BINDING SITE, designated SEQ ID:12, to the nucleotide sequence of VGAM16 RNA of FIG. 16A, designated SEQ ID:9.

[0293] An additional function of VGAM16 is therefore inhibition of ubiquitin-conjugating enzyme E2H (homologous to yeast UBC8) (UBE2H), a host gene which encodes a Enzyme that catalyzes the covalent attachment of ubiquitin to other proteins, as part of a novel viral mechanism used by Porcine adenovirus A for attacking a host. Accordingly, utilities of VGAM16 include diagnosis, prevention and treatment of viral infection by Porcine adenovirus A.

[0294] The function of UBE2H has been established by previous studies. Ubiquitin-conjugating enzymes catalyze the covalent attachment of ubiquitin to cellular substrates. Kaiser et al. (1994) isolated a novel ubiquitin-conjugating enzyme from human placenta and cloned the corresponding cDNA. DNA sequencing revealed that this gene, symbolized UBCH2 by them, encodes a protein with significant sequence similarity to yeast UBC8. They discovered that yeast UBC8 is interrupted by a single intron bearing an unusual branch point sequence. The authors noted that yeast UBC8 exhibited 54% amino acid sequence identity to human UBCH2. Moreover, full-length yeast and human enzymes expressed from the cDNAs showed similar enzymatic activities in vitro by catalyzing the ubiquitination of histones, suggesting that the 2 enzymes may fulfill similar functions in vivo. By study of hamster/human hybrid cell DNAs, Kaiser et al. (1994) demonstrated that the human UBC8 gene is located on chromosome 7. Hayashida et al. (2000) constructed a 1-Mb physical and transcript map of 7q32 and mapped UBE2H to a region between D7S530 and D7S649.

[0295] Full details of the abovementioned studies are described in the following publications, the disclosure of which are hereby incorporated by reference:
[0296] ayashida, S.; Yamasaki, K.; Asada, Y.; Soeda, E.; Niikawa, N.; Kishino, T.: Construction of a physical and transcript map flanking the imprinted MEST/PEG1 region at 7q32. Genomics 66: 221-225, 2000. PubMed ID: 10860668 2. Kaiser, P.; Seufert, W.; Hofferer, L.; Kofler, B.; Sachsenmaier, C.; Herzog, H.; Jentsch, S.; Schweiger, M.; Schneider, R.: Human ubiquitin-conjugating enzyme homologous to yeast UBC8. J. Biol. Chem. 269: 8797-8802, 1994.

[0297] Further studies establishing the function and utilities of UBE2H are found in John Hopkins OMIM database record ID 601082, and in references numbered 6-7 listed hereinbelow.

[0298] Reference is now made to UBE2H BINDING SITE. ubiquitin-conjugating enzyme E2H (homologous to yeast UBC8) (UBE2H) is a host target gene of VGAM16, corresponding to VGAM16-HOST-TARGET GENE of FIG. 16A. UBE2H BINDING SITE is a host binding site found in the 3′ untranslated region of UBE2H, corresponding to HOST BINDING SITE of FIG. 16A. FIG. 16D illustrates the complementarity of the nucleotide sequence of UBE2H BINDING SITE, designated SEQ ID:12, to the nucleotide sequence of VGAM16 RNA of FIG. 16A, designated SEQ ID:9.

[0299] An additional function of VGAM16 is therefore inhibition of ubiquitin-conjugating enzyme E2H (homologous to yeast UBC8) (UBE2H), a host gene which encodes a Enzyme that catalyzes the covalent attachment of ubiquitin to other proteins, as part of a novel viral mechanism used by Porcine adenovirus A for attacking a host. Accordingly, utilities of VGAM16 include diagnosis, prevention and treatment of viral infection by Porcine adenovirus A.

[0300] The function of UBE2H has been established by previous studies. Ubiquitin-conjugating enzymes catalyze the covalent attachment of ubiquitin to cellular substrates. Kaiser et al. (1994) isolated a novel ubiquitin-conjugating enzyme from human placenta and cloned the corresponding cDNA. DNA sequencing revealed that this gene, symbolized UBCH2 by them, encodes a protein with significant sequence similarity to yeast UBC8. They discovered that yeast UBC8 is interrupted by a single intron bearing an unusual branch point sequence. The authors noted that yeast UBC8 exhibited 54% amino acid sequence identity to human UBCH2. Moreover, full-length yeast and human enzymes expressed from the cDNAs showed similar enzymatic activities in vitro by catalyzing the ubiquitination of histones, suggesting that the 2 enzymes may fulfill similar functions in vivo. By study of hamster/human hybrid cell DNAs, Kaiser et al. (1994) demonstrated that the human UBC8 gene is located on chromosome 7. Hayashida et al. (2000) constructed a 1-Mb physical and transcript map of 7q32 and mapped UBE2H to a region between D7S530 and D7S649.

[0301] Full details of the abovementioned studies are described in the following publications, the disclosure of which are hereby incorporated by reference:
[0302] ayashida, S.; Yamasaki, K.; Asada, Y.; Soeda, E.; Niikawa, N.; Kishino, T.: Construction of a physical and transcript map flanking the imprinted MEST/PEG1 region at 7q32. Genomics 66: 221-225, 2000. PubMed ID: 10860668 2. Kaiser, P.; Seufert, W.; Hofferer, L.; Kofler, B.; Sachsenmaier, C.; Herzog, H.; Jentsch, S.; Schweiger, M.; Schneider, R.: Human ubiquitin-conjugating enzyme homologous to yeast UBC8. J. Biol. Chem. 269: 8797-8802, 1994.

[0303] Further studies establishing the function and utilities of UBE2H are found in John Hopkins OMIM database record ID 601082, and in references numbered 6-7 listed hereinbelow.

[0304] Reference is now made to FIG. 17A, which is a simplified diagram providing a conceptual explanation of the mode by which a novel bioinformatically detected viral gene, referred to here as Viral Genomic Address Messenger 17 (VGAM17) modulates expression of host target genes thereof, the function and utility of which host target genes is known in the art.

[0305] VGAM17 is a novel bioinformatically detected regulatory, non protein coding, viral micro RNA (miRNA) gene. The method by which VGAM17 was detected is described hereinabove with reference to FIGS. 2-8.

[0306] VGAM17 GENE is a viral gene contained in the genome of Porcine adenovirus A. VGAM17-HOST TARGET GENE is a human gene contained in the human genome.

[0307] VGAM17 GENE encodes a VGAM17 PRECURSOR RNA. Similar to other miRNA genes, and unlike most ordinary genes, the RNA transcribed by VGAM17, VGAM17 PRECURSOR RNA, does not encoded a protein.

[0308] VGAM17 PRECURSOR RNA folds onto itself, forming VGAM17 FOLDED PRECURSOR RNA. As FIG. 17 illustrates, VGAM17 FOLDED PRECURSOR RNA forms a ‘hairpin structure’, folding onto itself. As is well known in the art, this ‘hairpin structure’, is typical of RNA encoded by miRNA genes, and is due to the fact that the nucleotide sequence of the first half of the RNA encoded by a miRNA gene is an accurate or partial inversed-reversed sequence of the nucleotide sequence of the second half thereof. By “inversed-reversed” is meant a sequence which is reversed and wherein each nucleotide is replaced by a complimentary nucleotide, as is well known in the art (e.g. ATGGC is the inversed-reversed sequence of GCCAT).

[0309] An enzyme complex designated DICER COMPLEX, ‘dices’ the VGAM17 FOLDED PRECURSOR RNA into a single stranded ˜22 nt long RNA segment, designated VGAM17 RNA. As is known in the art, ‘dicing’ of a hairpin structured RNA precursor product into short a ˜22 nt RNA segment is catalyzed by an enzyme complex comprising an enzyme called Dicer together with other necessary proteins.

[0310] VGAM17-HOST TARGET GENE encodes a corresponding messenger RNA, designated VGAM17-HOST-TARGET RNA. VGAM17-HOST-TARGET RNA comprises three regions, as is typical of mRNA of a protein coding gene: a 5′ untranslated region, a protein coding region and a 3′ untranslated region, designated 5′UTR, PROTEIN CODING and 3′UTR respectively.

[0311] VGAM17 RNA binds complimentarily to a HOST BINDING SITE, located on an untranslated region of VGAM17-HOST-TARGET RNA. This complimentarily binding is due to the fact that the nucleotide sequence of VGAM17 RNA is an accurate or a partial inversed-reversed sequence of the nucleotide sequence of HOST BINDING SITE. It is appreciated that while FIG. 17A depicts the HOST BINDING SITE on the 3′UTR region, this is meant as an example only—the HOST BINDING SITE may be located on the 5′UTR region as well.

[0312] The complimentary binding of VGAM17 RNA to HOST BINDING SITE inhibits translation of VGAM17-HOST-TARGET RNA into VGAM17-HOST-TARGET PROTEIN. VGAM17-HOST-TARGET PROTEIN is therefore outlined by a broken line.

[0313] It is appreciated that VGAM17-HOST-TARGET GENE in fact represents a plurality of host target genes of VGAM17. The mRNA of each of this plurality of host target genes of VGAM17 comprises a HOST BINDING SITE, having a nucleotide sequence which is at least partly complementary to VGAM17 RNA, and which when bound by VGAM17 RNA causes inhibition of translation of one of a plurality of host target proteins of VGAM17. The plurality of host target genes of VGAM17 and their respective host binding sites, are described hereinbelow with reference to FIG. 17D.

[0314] It is appreciated by one skilled in the art that the mode of translational inhibition illustrated by FIG. 17A with specific reference to translational inhibition exerted by VGAM17 on one or more host target genes of VGAM17, is in fact common to other known miRNA genes. As mentioned hereinabove with reference to the background section, although a specific complimentary binding site has been demonstrated only for miRNA genes Lin-4 and Let-7, all other recently discovered miRNA genes are also believed by those skilled in the art to modulate expression of other genes by complimentary binding, although specific complimentary binding sites of these genes have not yet been found (Ruvkun G., ‘Perspective: Glimpses of a tiny RNA world’, Science 294, 779 (2001)).

[0315] It is further appreciated that a function of VGAM17 is inhibition of expression of host target genes, as part of a novel viral mechanism of attacking a host. Accordingly, utilities of VGAM17 include diagnosis, prevention and treatment of viral infection by Porcine adenovirus A.

[0316] Reference is now made to FIG. 17B which shows the nucleotide sequence of VGAM17 PRECURSOR RNA of FIG. 17A, designated SEQ ID:22, and a probable nucleotide sequence of VGAM17 RNA of FIG. 17A, designated SEQ ID:23. The nucleotide sequence of SEQ ID:23, which is highly likely (over 28%) to be identical or highly similar to that of VGAM17, is marked by an underline within the sequence of VGAM17 PRECURSOR RNA.

[0317] Reference is now made to FIG. 17C, which shows the secondary folding of VGAM17 PRECURSOR RNA, forming a ‘hairpin structure’ designated VGAM17 FOLDED PRECURSOR RNA, both of FIG. 17A. A probable (>28%) nucleotide sequence of VGAM17 RNA, designated SEQ ID:23 of FIG. 17B, is marked by an underline on VGAM17 FOLDED PRECURSOR RNA. It is appreciated that the complimentary base-paring is not perfect, with ‘bulges’, as is well known in the art with respect to the RNA folding of all known miRNA genes.

[0318] Reference is now made to FIG. 17D, which is a table showing binding sites found in untranslated regions of a plurality of host target genes of VGAM17, each binding site corresponding to HOST BINDING SITE of FIG. 17A, and their complementarity to SEQ ID:23, which is highly likely (>28%) to be identical or highly similar to the nucleotide sequence of VGAM17 RNA of FIG. 17A.

[0319] As mentioned hereinabove with reference to FIG. 17A a function of VGAM17 is inhibition of expression of host target genes, as part of a novel viral mechanism of attacking a host. Accordingly, utilities of VGAM17 include diagnosis, prevention and treatment of viral infection by Porcine adenovirus A. It is appreciated that specific functions, and accordingly utilities, of VGAM17 correlate with, and may be deduced from, the identity of the host target genes which VGAM17 binds and inhibits, and the function of these host target genes, as elaborated hereinbelow.

[0320] Reference is now made to CNR1 BINDING SITE. cannabinoid receptor 1 (brain) (CNR1) is a host target gene of VGAM17, corresponding to VGAM17-HOST TARGET GENE of FIG. 17A. CNR1 BINDING SITE is a host binding site found in the 3′ untranslated region of CNR1, corresponding to HOST BINDING SITE of FIG. 17A. FIG. 17D illustrates the complementarity of the nucleotide sequence of CNR1 BINDING SITE, designated SEQ ID:24, to the nucleotide sequence of VGAM17 RNA of FIG. 17A, designated SEQ ID:23.

[0321] A function of VGAM17 is therefore inhibition of cannabinoid receptor 1 (brain) (CNR1), a host gene which encodes a receptor that is involved in the cannabinoid-induced CNS effects., as part of a novel viral mechanism used by Porcine adenovirus A for attacking a host. Accordingly, utilities of VGAM17 include diagnosis, prevention and treatment of viral infection by Porcine adenovirus A.

[0322] The function of CNR1 has been established by previous studies. Ledent et al. (1999) investigated the function of the central cannabinoid receptor (CB1) by disrupting the gene in mice. Mutant mice did not respond to cannabinoid drugs, demonstrating the exclusive role of CB1 in mediating analgesia, reinforcement, hypothermia, hypolocomotion, and hypotension. The acute effects of opiates were unaffected, but the reinforcing properties of morphine and the severity of the withdrawal syndrome were strongly reduced. These observations suggested that CB1 is involved in the motivational properties of opiates and in the development of physical dependence, and extended the concept of an interconnected role of CB1 and opiate receptors in the brain areas mediating addictive behavior The cannabinoids are psychoactive ingredients of marijuana, principally delta-9-tetrahydrocannabinol, as well as the synthetic analogs. Matsuda et al. (1990) cloned a cannabinoid receptor from a rat brain. Gerard et al. (1991) isolated a cDNA encoding a cannabinoid receptor from a human brain stem cDNA library. The deduced amino acid sequence encoded a protein of 472 residues which shared 97.3% identity with the rat cannabinoid receptor cloned by Matsuda et al. (1990). They provided evidence for the existence of an identical cannabinoid receptor expressed in human testis

[0323] Animal model experiments lend further support to the function of CNR1. Di Marzo et al. (2001) showed that following temporary food restriction, CB1 receptor knockout mice eat less than their wildtype littermates, and the CB1 antagonist SR141716A reduces food intake in wildtype but not knockout mice. Furthermore, defective leptin (164160) signaling is associated with elevated hypothalamic, but not cerebellar, levels of endocannabinoids in obese db/db and ob/ob mice and Zucker rats. Acute leptin treatment of normal rats and ob/ob mice reduces anandamide and 2-arachidonoyl glycerol in the hypothalamus. Di Marzo et al. (2001) concluded that endocannabinoids in the hypothalamus may tonically activate CB1 receptors to maintain food intake and form part of the neural circuitry regulated by leptin

[0324] It is appreciated that the abovementioned animal model for CNR1 is acknowledged by those skilled in the art as a scientifically valid animal model, as can be further appreciated from the publications sited hereinbelow.

[0325] Full details of the abovementioned studies are described in the following publications, the disclosure of which are hereby incorporated by reference:
[0326] edent, C.; Valverde, O.; Cossu, G.; Petitet, F.; Aubert, J.-F.; Beslot, F.; Bohme, G. A.; Imperato, A.; Pedrazzini, T.; Rogues, B. P.; Vassart, G.; Fratta, W.; Parmentier, M.: Unresponsiveness to cannabinoids and reduced addictive effects of opiates in CB(1) receptor knockout mice. Science 283: 401-404, 1999. PubMed ID: 9888857 2. Gerard, C. M.; Mollereau, C.; Vassart, G.; Parmentier, M.: Molecular cloning of a human cannabinoid receptor which is also expressed in testis. Biochem. J. 279: 129-134, 1991.

[0327] Further studies establishing the function and utilities of CNR1 are found in John Hopkins OMIM database record ID 114610, and in references numbered 8-15 listed hereinbelow.

[0328] Reference is now made to EXTL1 BINDING SITE. exostoses (multiple)-like 1 (EXTL1) is a host target gene of VGAM17, corresponding to VGAM17-HOST-TARGET GENE of FIG. 17A. EXTL1 BINDING SITE is a host binding site found in the 3′ untranslated region of EXTL1, corresponding to HOST BINDING SITE of FIG. 17A. FIG. 17D illustrates the complementarity of the nucleotide sequence of EXTL1 BINDING SITE, designated SEQ ID:25, to the nucleotide sequence of VGAM17 RNA of FIG. 17A, designated SEQ ID:23.

[0329] Yet another function of VGAM17 is therefore inhibition of exostoses (multiple)-like 1 (EXTL1), a host gene which encodes a Protein that probably contribute to the synthesis of heparan sulfate and heparin., as part of a novel viral mechanism used by Porcine adenovirus A for attacking a host. Accordingly, utilities of VGAM17 include diagnosis, prevention and treatment of viral infection by Porcine adenovirus A.

[0330] The function of EXTL1 has been established by previous studies. The tumor suppressors EXT1 (133700) and EXT2 (133701) are associated with hereditary multiple exostoses and encode bifunctional glycosyltransferases essential for chain polymerization of heparan sulfate and its analog, heparin. Wise et al. (1997) identified another gene, termed EXTL by them, that showed striking sequence similarity to both EXT1 and EXT2 at the nucleotide and amino acid sequence levels. Although the mRNA transcribed from this gene is similar in size to that of EXT1 and EXT2, its pattern of expression was quite different. Of the 3 highly homologous EXT-like genes, EXTL1, EXTL2 (602411), and EXTL3 (605744), EXTL2 is an alpha-1,4-GlcNAc transferase I, the key enzyme that initiates the heparan sulfate/heparin synthesis. Kim et al. (2001) transiently expressed truncated forms of EXTL1 and EXTL3, lacking the putative NH2-terminal transmembrane and cytoplasmic domains, in COS-1 cells and found that the cells harbored alpha-GlcNAc transferase activity. Various results suggested that EXTL3 is most likely involved in both chain initiation and elongation, whereas EXTL1 is possibly involved only in the chain elongation of heparan sulfate, and perhaps of heparin as well. Thus, the acceptor specificities of the 5 family members are overlapping but distinct, except for EXT1 and EXT2, which have the same specificity. Thus, all of the 5 cloned human EXT gene family proteins harbor glycosyltransferase activities, which probably contribute to the synthesis of heparan sulfate and heparin. Xu et al. (1999) examined the EXTL1 and EXTL2 genes for the presence of germline mutations in hereditary multiple exostosis patients and found none. Hall et al. (2002) proposed the EXTL genes as candidates for second mutations leading to the development of exostoses. By radiation hybrid analysis and by fluorescence in situ hybridization, Wise et al. (1997) mapped EXTL to 1p36.1 between D1S458 and D1S511, a region that frequently shows loss of heterozygosity in a variety of tumor types.

[0331] Full details of the abovementioned studies are described in the following publications, the disclosure of which are hereby incorporated by reference:
[0332] ise, C. A.; Clines, G. A.; Massa, H.; Trask, B. J.; Lovett, M.: Identification and localization of the gene for EXTL, a third member of the multiple exostoses gene family. Genome Res. 7: 10-16, 1997. PubMed ID: 9037597 2. Kim, B.-T.; Kitagawa, H.; Tamura, J.; Saito, T.; Kusche-Gullberg, M.; Lindahl, U.; Sugahara, K.: Human tumor suppressor EXT gene family members EXTL1 and EXTL3 encode alpha-1,4-N-acetylglucosaminyltransferases that likely are involved in heparan sulfate/heparin biosynthesis. Proc. Nat. Acad. Sci. 98: 7176-7181, 2001.

[0333] Further studies establishing the function and utilities of EXTL1 are found in John Hopkins OMIM database record ID 601738, and in references numbered 16-19 listed hereinbelow.

[0334] Reference is now made to EXTL1 BINDING SITE. exostoses (multiple)-like 1 (EXTL1) is a host target gene of VGAM17, corresponding to VGAM17-HOST-TARGET GENE of FIG. 17A. EXTL1 BINDING SITE is a host binding site found in the 3′ untranslated region of EXTL1, corresponding to HOST BINDING SITE of FIG. 17A. FIG. 17D illustrates the complementarity of the nucleotide sequence of EXTL1 BINDING SITE, designated SEQ ID:25, to the nucleotide sequence of VGAM17 RNA of FIG. 17A, designated SEQ ID:23.

[0335] Yet another function of VGAM17 is therefore inhibition of exostoses (multiple)-like 1 (EXTL1), a host gene which encodes a Protein that probably contribute to the synthesis of heparan sulfate and heparin., as part of a novel viral mechanism used by Porcine adenovirus A for attacking a host. Accordingly, utilities of VGAM17 include diagnosis, prevention and treatment of viral infection by Porcine adenovirus A.

[0336] The function of EXTL1 has been established by previous studies. The tumor suppressors EXT1 (133700) and EXT2 (133701) are associated with hereditary multiple exostoses and encode bifunctional glycosyltransferases essential for chain polymerization of heparan sulfate and its analog, heparin. Wise et al. (1997) identified another gene, termed EXTL by them, that showed striking sequence similarity to both EXT1 and EXT2 at the nucleotide and amino acid sequence levels. Although the mRNA transcribed from this gene is similar in size to that of EXT1 and EXT2, its pattern of expression was quite different. Of the 3 highly homologous EXT-like genes, EXTL1, EXTL2 (602411), and EXTL3 (605744), EXTL2 is an alpha-1,4-GlcNAc transferase I, the key enzyme that initiates the heparan sulfate/heparin synthesis. Kim et al. (2001) transiently expressed truncated forms of EXTL1 and EXTL3, lacking the putative NH2-terminal transmembrane and cytoplasmic domains, in COS-1 cells and found that the cells harbored alpha-GlcNAc transferase activity. Various results suggested that EXTL3 is most likely involved in both chain initiation and elongation, whereas EXTL1 is possibly involved only in the chain elongation of heparan sulfate, and perhaps of heparin as well. Thus, the acceptor specificities of the 5 family members are overlapping but distinct, except for EXT1 and EXT2, which have the same specificity. Thus, all of the 5 cloned human EXT gene family proteins harbor glycosyltransferase activities, which probably contribute to the synthesis of heparan sulfate and heparin. Xu et al. (1999) examined the EXTL1 and EXTL2 genes for the presence of germline mutations in hereditary multiple exostosis patients and found none. Hall et al. (2002) proposed the EXTL genes as candidates for second mutations leading to the development of exostoses. By radiation hybrid analysis and by fluorescence in situ hybridization, Wise et al. (1997) mapped EXTL to 1p36.1 between D1S458 and D1S511, a region that frequently shows loss of heterozygosity in a variety of tumor types.

[0337] Full details of the abovementioned studies are described in the following publications, the disclosure of which are hereby incorporated by reference:
[0338] ise, C. A.; Clines, G. A.; Massa, H.; Trask, B. J.; Lovett, M.: Identification and localization of the gene for EXTL, a third member of the multiple exostoses gene family. Genome Res. 7: 10-16, 1997. PubMed ID: 9037597 2. Kim, B.-T.; Kitagawa, H.; Tamura, J.; Saito, T.; Kusche-Gullberg, M.; Lindahl, U.; Sugahara, K.: Human tumor suppressor EXT gene family members EXTL1 and EXTL3 encode alpha-1,4-N-acetylglucosaminyltransferases that likely are involved in heparan sulfate/heparin biosynthesis. Proc. Nat. Acad. Sci. 98: 7176-7181, 2001.

[0339] Further studies establishing the function and utilities of EXTL1 are found in John Hopkins OMIM database record ID 601738, and in references numbered 16-19 listed hereinbelow.

[0340] Reference is now made to EXTL1 BINDING SITE. exostoses (multiple)-like 1 (EXTL1) is a host target gene of VGAM17, corresponding to VGAM17-HOST-TARGET GENE of FIG. 17A. EXTL1 BINDING SITE is a host binding site found in the 3′ untranslated region of EXTL1, corresponding to HOST BINDING SITE of FIG. 17A. FIG. 17D illustrates the complementarity of the nucleotide sequence of EXTL1 BINDING SITE, designated SEQ ID:25, to the nucleotide sequence of VGAM17 RNA of FIG. 17A, designated SEQ ID:23.

[0341] Yet another function of VGAM17 is therefore inhibition of exostoses (multiple)-like 1 (EXTL1), a host gene which encodes a Protein that probably contribute to the synthesis of heparan sulfate and heparin., as part of a novel viral mechanism used by Porcine adenovirus A for attacking a host. Accordingly, utilities of VGAM17 include diagnosis, prevention and treatment of viral infection by Porcine adenovirus A.

[0342] The function of EXTL1 has been established by previous studies. The tumor suppressors EXT1 (133700) and EXT2 (133701) are associated with hereditary multiple exostoses and encode bifunctional glycosyltransferases essential for chain polymerization of heparan sulfate and its analog, heparin. Wise et al. (1997) identified another gene, termed EXTL by them, that showed striking sequence similarity to both EXT1 and EXT2 at the nucleotide and amino acid sequence levels. Although the mRNA transcribed from this gene is similar in size to that of EXT1 and EXT2, its pattern of expression was quite different. Of the 3 highly homologous EXT-like genes, EXTL1, EXTL2 (602411), and EXTL3 (605744), EXTL2 is an alpha-1,4-GlcNAc transferase I, the key enzyme that initiates the heparan sulfate/heparin synthesis. Kim et al. (2001) transiently expressed truncated forms of EXTL1 and EXTL3, lacking the putative NH2-terminal transmembrane and cytoplasmic domains, in COS-1 cells and found that the cells harbored alpha-GlcNAc transferase activity. Various results suggested that EXTL3 is most likely involved in both chain initiation and elongation, whereas EXTL1 is possibly involved only in the chain elongation of heparan sulfate, and perhaps of heparin as well. Thus, the acceptor specificities of the 5 family members are overlapping but distinct, except for EXT1 and EXT2, which have the same specificity. Thus, all of the 5 cloned human EXT gene family proteins harbor glycosyltransferase activities, which probably contribute to the synthesis of heparan sulfate and heparin. Xu et al. (1999) examined the EXTL1 and EXTL2 genes for the presence of germline mutations in hereditary multiple exostosis patients and found none. Hall et al. (2002) proposed the EXTL genes as candidates for second mutations leading to the development of exostoses. By radiation hybrid analysis and by fluorescence in situ hybridization, Wise et al. (1997) mapped EXTL to 1p36.1 between D1S458 and D1S511, a region that frequently shows loss of heterozygosity in a variety of tumor types.

[0343] Full details of the abovementioned studies are described in the following publications, the disclosure of which are hereby incorporated by reference:
[0344] ise, C. A.; Clines, G. A.; Massa, H.; Trask, B. J.; Lovett, M.: Identification and localization of the gene for EXTL, a third member of the multiple exostoses gene family. Genome Res. 7: 10-16, 1997. PubMed ID: 9037597 2. Kim, B.-T.; Kitagawa, H.; Tamura, J.; Saito, T.; Kusche-Gullberg, M.; Lindahl, U.; Sugahara, K.: Human tumor suppressor EXT gene family members EXTL1 and EXTL3 encode alpha-1,4-N-acetylgluco saminyltransferases that likely are involved in heparan sulfate/heparin biosynthesis. Proc. Nat. Acad. Sci. 98: 7176-7181, 2001.

[0345] Further studies establishing the function and utilities of EXTL1 are found in John Hopkins OMIM database record ID 601738, and in references numbered 16-19 listed hereinbelow.

[0346] Reference is now made to EXTL1 BINDING SITE. exostoses (multiple)-like 1 (EXTL1) is a host target gene of VGAM17, corresponding to VGAM17-HOST-TARGET GENE of FIG. 17A. EXTL1 BINDING SITE is a host binding site found in the 3′ untranslated region of EXTL1, corresponding to HOST BINDING SITE of FIG. 17A. FIG. 17D illustrates the complementarity of the nucleotide sequence of EXTL1 BINDING SITE, designated SEQ ID:25, to the nucleotide sequence of VGAM17 RNA of FIG. 17A, designated SEQ ID:23.

[0347] Yet another function of VGAM17 is therefore inhibition of exostoses (multiple)-like 1 (EXTL1), a host gene which encodes a Protein that probably contribute to the synthesis of heparan sulfate and heparin., as part of a novel viral mechanism used by Porcine adenovirus A for attacking a host. Accordingly, utilities of VGAM17 include diagnosis, prevention and treatment of viral infection by Porcine adenovirus A.

[0348] The function of EXTL1 has been established by previous studies. The tumor suppressors EXT1 (133700) and EXT2 (133701) are associated with hereditary multiple exostoses and encode bifunctional glycosyltransferases essential for chain polymerization of heparan sulfate and its analog, heparin. Wise et al. (1997) identified another gene, termed EXTL by them, that showed striking sequence similarity to both EXT1 and EXT2 at the nucleotide and amino acid sequence levels. Although the mRNA transcribed from this gene is similar in size to that of EXT1 and EXT2, its pattern of expression was quite different. Of the 3 highly homologous EXT-like genes, EXTL1, EXTL2 (602411), and EXTL3 (605744), EXTL2 is an alpha-1,4-GlcNAc transferase I, the key enzyme that initiates the heparan sulfate/heparin synthesis. Kim et al. (2001) transiently expressed truncated forms of EXTL1 and EXTL3, lacking the putative NH2-terminal transmembrane and cytoplasmic domains, in COS-1 cells and found that the cells harbored alpha-GlcNAc transferase activity. Various results suggested that EXTL3 is most likely involved in both chain initiation and elongation, whereas EXTL1 is possibly involved only in the chain elongation of heparan sulfate, and perhaps of heparin as well. Thus, the acceptor specificities of the 5 family members are overlapping but distinct, except for EXT1 and EXT2, which have the same specificity. Thus, all of the 5 cloned human EXT gene family proteins harbor glycosyltransferase activities, which probably contribute to the synthesis of heparan sulfate and heparin. Xu et al. (1999) examined the EXTL1 and EXTL2 genes for the presence of germline mutations in hereditary multiple exostosis patients and found none. Hall et al. (2002) proposed the EXTL genes as candidates for second mutations leading to the development of exostoses. By radiation hybrid analysis and by fluorescence in situ hybridization, Wise et al. (1997) mapped EXTL to 1p36.1 between D1S458 and D1S511, a region that frequently shows loss of heterozygosity in a variety of tumor types.

[0349] Full details of the abovementioned studies are described in the following publications, the disclosure of which are hereby incorporated by reference:
[0350] ise, C. A.; Clines, G. A.; Massa, H.; Trask, B. J.; Lovett, M.: Identification and localization of the gene for EXTL, a third member of the multiple exostoses gene family. Genome Res. 7: 10-16, 1997. PubMed ID: 9037597 2. Kim, B.-T.; Kitagawa, H.; Tamura, J.; Saito, T.; Kusche-Gullberg, M.; Lindahl, U.; Sugahara, K.: Human tumor suppressor EXT gene family members EXTL1 and EXTL3 encode alpha-1,4-N-acetylgluco saminyltransferases that likely are involved in heparan sulfate/heparin biosynthesis. Proc. Nat. Acad. Sci. 98: 7176-7181, 2001.

[0351] Further studies establishing the function and utilities of EXTL1 are found in John Hopkins OMIM database record ID 601738, and in references numbered 16-19 listed hereinbelow.

[0352] Reference is now made to EXTL1 BINDING SITE. exostoses (multiple)-like 1 (EXTL1) is a host target gene of VGAM17, corresponding to VGAM17-HOST-TARGET GENE of FIG. 17A. EXTL1 BINDING SITE is a host binding site found in the 3′ untranslated region of EXTL1, corresponding to HOST BINDING SITE of FIG. 17A. FIG. 17D illustrates the complementarity of the nucleotide sequence of EXTL1 BINDING SITE, designated SEQ ID:25, to the nucleotide sequence of VGAM17 RNA of FIG. 17A, designated SEQ ID:23.

[0353] Yet another function of VGAM17 is therefore inhibition of exostoses (multiple)-like 1 (EXTL1), a host gene which encodes a Protein that probably contribute to the synthesis of heparan sulfate and heparin., as part of a novel viral mechanism used by Porcine adenovirus A for attacking a host. Accordingly, utilities of VGAM17 include diagnosis, prevention and treatment of viral infection by Porcine adenovirus A.

[0354] The function of EXTL1 has been established by previous studies. The tumor suppressors EXT1 (133700) and EXT2 (133701) are associated with hereditary multiple exostoses and encode bifunctional glycosyltransferases essential for chain polymerization of heparan sulfate and its analog, heparin. Wise et al. (1997) identified another gene, termed EXTL by them, that showed striking sequence similarity to both EXT1 and EXT2 at the nucleotide and amino acid sequence levels. Although the mRNA transcribed from this gene is similar in size to that of EXT1 and EXT2, its pattern of expression was quite different. Of the 3 highly homologous EXT-like genes, EXTL1, EXTL2 (602411), and EXTL3 (605744), EXTL2 is an alpha-1,4-GlcNAc transferase I, the key enzyme that initiates the heparan sulfate/heparin synthesis. Kim et al. (2001) transiently expressed truncated forms of EXTL1 and EXTL3, lacking the putative NH2-terminal transmembrane and cytoplasmic domains, in COS-1 cells and found that the cells harbored alpha-GlcNAc transferase activity. Various results suggested that EXTL3 is most likely involved in both chain initiation and elongation, whereas EXTL1 is possibly involved only in the chain elongation of heparan sulfate, and perhaps of heparin as well. Thus, the acceptor specificities of the 5 family members are overlapping but distinct, except for EXT1 and EXT2, which have the same specificity. Thus, all of the 5 cloned human EXT gene family proteins harbor glycosyltransferase activities, which probably contribute to the synthesis of heparan sulfate and heparin. Xu et al. (1999) examined the EXTL1 and EXTL2 genes for the presence of germline mutations in hereditary multiple exostosis patients and found none. Hall et al. (2002) proposed the EXTL genes as candidates for second mutations leading to the development of exostoses. By radiation hybrid analysis and by fluorescence in situ hybridization, Wise et al. (1997) mapped EXTL to 1p36.1 between D1S458 and D1S511, a region that frequently shows loss of heterozygosity in a variety of tumor types.

[0355] Full details of the abovementioned studies are described in the following publications, the disclosure of which are hereby incorporated by reference:
[0356] ise, C. A.; Clines, G. A.; Massa, H.; Trask, B. J.; Lovett, M.: Identification and localization of the gene for EXTL, a third member of the multiple exostoses gene family. Genome Res. 7: 10-16, 1997. PubMed ID: 9037597 2. Kim, B.-T.; Kitagawa, H.; Tamura, J.; Saito, T.; Kusche-Gullberg, M.; Lindahl, U.; Sugahara, K.: Human tumor suppressor EXT gene family members EXTL1 and EXTL3 encode alpha-1,4-N-acetylgluco saminyltransferases that likely are involved in heparan sulfate/heparin biosynthesis. Proc. Nat. Acad. Sci. 98: 7176-7181, 2001.

[0357] Further studies establishing the function and utilities of EXTL1 are found in John Hopkins OMIM database record ID 601738, and in references numbered 16-19 listed hereinbelow.

[0358] Reference is now made to EXTL1 BINDING SITE. exostoses (multiple)-like 1 (EXTL1) is a host target gene of VGAM17, corresponding to VGAM17-HOST-TARGET GENE of FIG. 17A. EXTL1 BINDING SITE is a host binding site found in the 3′ untranslated region of EXTL1, corresponding to HOST BINDING SITE of FIG. 17A. FIG. 17D illustrates the complementarity of the nucleotide sequence of EXTL1 BINDING SITE, designated SEQ ID:25, to the nucleotide sequence of VGAM17 RNA of FIG. 17A, designated SEQ ID:23.

[0359] Yet another function of VGAM17 is therefore inhibition of exostoses (multiple)-like 1 (EXTL1), a host gene which encodes a Protein that probably contribute to the synthesis of heparan sulfate and heparin., as part of a novel viral mechanism used by Porcine adenovirus A for attacking a host. Accordingly, utilities of VGAM17 include diagnosis, prevention and treatment of viral infection by Porcine adenovirus A.

[0360] The function of EXTL1 has been established by previous studies. The tumor suppressors EXT1 (133700) and EXT2 (133701) are associated with hereditary multiple exostoses and encode bifunctional glycosyltransferases essential for chain polymerization of heparan sulfate and its analog, heparin. Wise et al. (1997) identified another gene, termed EXTL by them, that showed striking sequence similarity to both EXT1 and EXT2 at the nucleotide and amino acid sequence levels. Although the mRNA transcribed from this gene is similar in size to that of EXT1 and EXT2, its pattern of expression was quite different. Of the 3 highly homologous EXT-like genes, EXTL1, EXTL2 (602411), and EXTL3 (605744), EXTL2 is an alpha-1,4-GlcNAc transferase I, the key enzyme that initiates the heparan sulfate/heparin synthesis. Kim et al. (2001) transiently expressed truncated forms of EXTL1 and EXTL3, lacking the putative NH2-terminal transmembrane and cytoplasmic domains, in COS-1 cells and found that the cells harbored alpha-GlcNAc transferase activity. Various results suggested that EXTL3 is most likely involved in both chain initiation and elongation, whereas EXTL1 is possibly involved only in the chain elongation of heparan sulfate, and perhaps of heparin as well. Thus, the acceptor specificities of the 5 family members are overlapping but distinct, except for EXT1 and EXT2, which have the same specificity. Thus, all of the 5 cloned human EXT gene family proteins harbor glycosyltransferase activities, which probably contribute to the synthesis of heparan sulfate and heparin. Xu et al. (1999) examined the EXTL1 and EXTL2 genes for the presence of germline mutations in hereditary multiple exostosis patients and found none. Hall et al. (2002) proposed the EXTL genes as candidates for second mutations leading to the development of exostoses. By radiation hybrid analysis and by fluorescence in situ hybridization, Wise et al. (1997) mapped EXTL to 1p36.1 between D1S458 and D1S511, a region that frequently shows loss of heterozygosity in a variety of tumor types.

[0361] Full details of the abovementioned studies are described in the following publications, the disclosure of which are hereby incorporated by reference:
[0362] ise, C. A.; Clines, G. A.; Massa, H.; Trask, B. J.; Lovett, M.: Identification and localization of the gene for EXTL, a third member of the multiple exostoses gene family. Genome Res. 7: 10-16, 1997. PubMed ID: 9037597 2. Kim, B.-T.; Kitagawa, H.; Tamura, J.; Saito, T.; Kusche-Gullberg, M.; Lindahl, U.; Sugahara, K.: Human tumor suppressor EXT gene family members EXTL1 and EXTL3 encode alpha-1,4-N-acetylgluco saminyltransferases that likely are involved in heparan sulfate/heparin biosynthesis. Proc. Nat. Acad. Sci. 98: 7176-7181, 2001.

[0363] Further studies establishing the function and utilities of EXTL1 are found in John Hopkins OMIM database record ID 601738, and in references numbered 16-19 listed hereinbelow.

[0364] Reference is now made to EXTL1 BINDING SITE. exostoses (multiple)-like 1 (EXTL1) is a host target gene of VGAM17, corresponding to VGAM17-HOST-TARGET GENE of FIG. 17A. EXTL1 BINDING SITE is a host binding site found in the 3′ untranslated region of EXTL1, corresponding to HOST BINDING SITE of FIG. 17A. FIG. 17D illustrates the complementarity of the nucleotide sequence of EXTL1 BINDING SITE, designated SEQ ID:25, to the nucleotide sequence of VGAM17 RNA of FIG. 17A, designated SEQ ID:23.

[0365] Yet another function of VGAM17 is therefore inhibition of exostoses (multiple)-like 1 (EXTL1), a host gene which encodes a Protein that probably contribute to the synthesis of heparan sulfate and heparin., as part of a novel viral mechanism used by Porcine adenovirus A for attacking a host. Accordingly, utilities of VGAM17 include diagnosis, prevention and treatment of viral infection by Porcine adenovirus A.

[0366] The function of EXTL1 has been established by previous studies. The tumor suppressors EXT1 (133700) and EXT2 (133701) are associated with hereditary multiple exostoses and encode bifunctional glycosyltransferases essential for chain polymerization of heparan sulfate and its analog, heparin. Wise et al. (1997) identified another gene, termed EXTL by them, that showed striking sequence similarity to both EXT1 and EXT2 at the nucleotide and amino acid sequence levels. Although the mRNA transcribed from this gene is similar in size to that of EXT1 and EXT2, its pattern of expression was quite different. Of the 3 highly homologous EXT-like genes, EXTL1, EXTL2 (602411), and EXTL3 (605744), EXTL2 is an alpha-1,4-GlcNAc transferase I, the key enzyme that initiates the heparan sulfate/heparin synthesis. Kim et al. (2001) transiently expressed truncated forms of EXTL1 and EXTL3, lacking the putative NH2-terminal transmembrane and cytoplasmic domains, in COS-1 cells and found that the cells harbored alpha-GlcNAc transferase activity. Various results suggested that EXTL3 is most likely involved in both chain initiation and elongation, whereas EXTL1 is possibly involved only in the chain elongation of heparan sulfate, and perhaps of heparin as well. Thus, the acceptor specificities of the 5 family members are overlapping but distinct, except for EXT1 and EXT2, which have the same specificity. Thus, all of the 5 cloned human EXT gene family proteins harbor glycosyltransferase activities, which probably contribute to the synthesis of heparan sulfate and heparin. Xu et al. (1999) examined the EXTL1 and EXTL2 genes for the presence of germline mutations in hereditary multiple exostosis patients and found none. Hall et al. (2002) proposed the EXTL genes as candidates for second mutations leading to the development of exostoses. By radiation hybrid analysis and by fluorescence in situ hybridization, Wise et al. (1997) mapped EXTL to 1p36.1 between D1S458 and D1S511, a region that frequently shows loss of heterozygosity in a variety of tumor types.

[0367] Full details of the abovementioned studies are described in the following publications, the disclosure of which are hereby incorporated by reference:
[0368] ise, C. A.; Clines, G. A.; Massa, H.; Trask, B. J.; Lovett, M.: Identification and localization of the gene for EXTL, a third member of the multiple exostoses gene family. Genome Res. 7: 10-16, 1997. PubMed ID: 9037597 2. Kim, B.-T.; Kitagawa, H.; Tamura, J.; Saito, T.; Kusche-Gullberg, M.; Lindahl, U.; Sugahara, K.: Human tumor suppressor EXT gene family members EXTL1 and EXTL3 encode alpha-1,4-N-acetylgluco saminyltransferases that likely are involved in heparan sulfate/heparin biosynthesis. Proc. Nat. Acad. Sci. 98: 7176-7181, 2001.

[0369] Further studies establishing the function and utilities of EXTL1 are found in John Hopkins OMIM database record ID 601738, and in references numbered 16-19 listed hereinbelow.

[0370] Reference is now made to EXTL1 BINDING SITE. exostoses (multiple)-like 1 (EXTL1) is a host target gene of VGAM17, corresponding to VGAM17-HOST-TARGET GENE of FIG. 17A. EXTL1 BINDING SITE is a host binding site found in the 3′ untranslated region of EXTL1, corresponding to HOST BINDING SITE of FIG. 17A. FIG. 17D illustrates the complementarity of the nucleotide sequence of EXTL1 BINDING SITE, designated SEQ ID:25, to the nucleotide sequence of VGAM17 RNA of FIG. 17A, designated SEQ ID:23.

[0371] Yet another function of VGAM17 is therefore inhibition of exostoses (multiple)-like 1 (EXTL1), a host gene which encodes a Protein that probably contribute to the synthesis of heparan sulfate and heparin., as part of a novel viral mechanism used by Porcine adenovirus A for attacking a host. Accordingly, utilities of VGAM17 include diagnosis, prevention and treatment of viral infection by Porcine adenovirus A.

[0372] The function of EXTL1 has been established by previous studies. The tumor suppressors EXT1 (133700) and EXT2 (133701) are associated with hereditary multiple exostoses and encode bifunctional glycosyltransferases essential for chain polymerization of heparan sulfate and its analog, heparin. Wise et al. (1997) identified another gene, termed EXTL by them, that showed striking sequence similarity to both EXT1 and EXT2 at the nucleotide and amino acid sequence levels. Although the mRNA transcribed from this gene is similar in size to that of EXT1 and EXT2, its pattern of expression was quite different. Of the 3 highly homologous EXT-like genes, EXTL1, EXTL2 (602411), and EXTL3 (605744), EXTL2 is an alpha-1,4-GlcNAc transferase I, the key enzyme that initiates the heparan sulfate/heparin synthesis. Kim et al. (2001) transiently expressed truncated forms of EXTL1 and EXTL3, lacking the putative NH2-terminal transmembrane and cytoplasmic domains, in COS-1 cells and found that the cells harbored alpha-GlcNAc transferase activity. Various results suggested that EXTL3 is most likely involved in both chain initiation and elongation, whereas EXTL1 is possibly involved only in the chain elongation of heparan sulfate, and perhaps of heparin as well. Thus, the acceptor specificities of the 5 family members are overlapping but distinct, except for EXT1 and EXT2, which have the same specificity. Thus, all of the 5 cloned human EXT gene family proteins harbor glycosyltransferase activities, which probably contribute to the synthesis of heparan sulfate and heparin. Xu et al. (1999) examined the EXTL1 and EXTL2 genes for the presence of germline mutations in hereditary multiple exostosis patients and found none. Hall et al. (2002) proposed the EXTL genes as candidates for second mutations leading to the development of exostoses. By radiation hybrid analysis and by fluorescence in situ hybridization, Wise et al. (1997) mapped EXTL to 1p36.1 between D1S458 and D1S511, a region that frequently shows loss of heterozygosity in a variety of tumor types.

[0373] Full details of the abovementioned studies are described in the following publications, the disclosure of which are hereby incorporated by reference:
[0374] ise, C. A.; Clines, G. A.; Massa, H.; Trask, B. J.; Lovett, M.: Identification and localization of the gene for EXTL, a third member of the multiple exostoses gene family. Genome Res. 7: 10-16, 1997. PubMed ID: 9037597 2. Kim, B.-T.; Kitagawa, H.; Tamura, J.; Saito, T.; Kusche-Gullberg, M.; Lindahl, U.; Sugahara, K.: Human tumor suppressor EXT gene family members EXTL1 and EXTL3 encode alpha-1,4-N-acetylgluco saminyltransferases that likely are involved in heparan sulfate/heparin biosynthesis. Proc. Nat. Acad. Sci. 98: 7176-7181, 2001.

[0375] Further studies establishing the function and utilities of EXTL1 are found in John Hopkins OMIM database record ID 601738, and in references numbered 16-19 listed hereinbelow.

[0376] Reference is now made to EXTL1 BINDING SITE. exostoses (multiple)-like 1 (EXTL1) is a host target gene of VGAM17, corresponding to VGAM17-HOST-TARGET GENE of FIG. 17A. EXTL1 BINDING SITE is a host binding site found in the 3′ untranslated region of EXTL1, corresponding to HOST BINDING SITE of FIG. 17A. FIG. 17D illustrates the complementarity of the nucleotide sequence of EXTL1 BINDING SITE, designated SEQ ID:25, to the nucleotide sequence of VGAM17 RNA of FIG. 17A, designated SEQ ID:23.

[0377] Yet another function of VGAM17 is therefore inhibition of exostoses (multiple)-like 1 (EXTL1), a host gene which encodes a Protein that probably contribute to the synthesis of heparan sulfate and heparin., as part of a novel viral mechanism used by Porcine adenovirus A for attacking a host. Accordingly, utilities of VGAM17 include diagnosis, prevention and treatment of viral infection by Porcine adenovirus A.

[0378] The function of EXTL1 has been established by previous studies. The tumor suppressors EXT1 (133700) and EXT2 (133701) are associated with hereditary multiple exostoses and encode bifunctional glycosyltransferases essential for chain polymerization of heparan sulfate and its analog, heparin. Wise et al. (1997) identified another gene, termed EXTL by them, that showed striking sequence similarity to both EXT1 and EXT2 at the nucleotide and amino acid sequence levels. Although the mRNA transcribed from this gene is similar in size to that of EXT1 and EXT2, its pattern of expression was quite different. Of the 3 highly homologous EXT-like genes, EXTL1, EXTL2 (602411), and EXTL3 (605744), EXTL2 is an alpha-1,4-GlcNAc transferase I, the key enzyme that initiates the heparan sulfate/heparin synthesis. Kim et al. (2001) transiently expressed truncated forms of EXTL1 and EXTL3, lacking the putative NH2-terminal transmembrane and cytoplasmic domains, in COS-1 cells and found that the cells harbored alpha-GlcNAc transferase activity. Various results suggested that EXTL3 is most likely involved in both chain initiation and elongation, whereas EXTL1 is possibly involved only in the chain elongation of heparan sulfate, and perhaps of heparin as well. Thus, the acceptor specificities of the 5 family members are overlapping but distinct, except for EXT1 and EXT2, which have the same specificity. Thus, all of the 5 cloned human EXT gene family proteins harbor glycosyltransferase activities, which probably contribute to the synthesis of heparan sulfate and heparin. Xu et al. (1999) examined the EXTL1 and EXTL2 genes for the presence of germline mutations in hereditary multiple exostosis patients and found none. Hall et al. (2002) proposed the EXTL genes as candidates for second mutations leading to the development of exostoses. By radiation hybrid analysis and by fluorescence in situ hybridization, Wise et al. (1997) mapped EXTL to 1p36.1 between D1S458 and D1S511, a region that frequently shows loss of heterozygosity in a variety of tumor types.

[0379] Full details of the abovementioned studies are described in the following publications, the disclosure of which are hereby incorporated by reference:
[0380] ise, C. A.; Clines, G. A.; Massa, H.; Trask, B. J.; Lovett, M.: Identification and localization of the gene for EXTL, a third member of the multiple exostoses gene family. Genome Res. 7: 10-16, 1997. PubMed ID: 9037597 2. Kim, B.-T.; Kitagawa, H.; Tamura, J.; Saito, T.; Kusche-Gullberg, M.; Lindahl, U.; Sugahara, K.: Human tumor suppressor EXT gene family members EXTL1 and EXTL3 encode alpha-1,4-N-acetylglucosaminyltransferases that likely are involved in heparan sulfate/heparin biosynthesis. Proc. Nat. Acad. Sci. 98: 7176-7181, 2001.

[0381] Further studies establishing the function and utilities of EXTL1 are found in John Hopkins OMIM database record ID 601738, and in references numbered 16-19 listed hereinbelow.

[0382] Reference is now made to EXTL1 BINDING SITE. exostoses (multiple)-like 1 (EXTL1) is a host target gene of VGAM17, corresponding to VGAM17-HOST-TARGET GENE of FIG. 17A. EXTL1 BINDING SITE is a host binding site found in the 3′ untranslated region of EXTL1, corresponding to HOST BINDING SITE of FIG. 17A. FIG. 17D illustrates the complementarity of the nucleotide sequence of EXTL1 BINDING SITE, designated SEQ ID:25, to the nucleotide sequence of VGAM17 RNA of FIG. 17A, designated SEQ ID:23.

[0383] Yet another function of VGAM17 is therefore inhibition of exostoses (multiple)-like 1 (EXTL1), a host gene which encodes a Protein that probably contribute to the synthesis of heparan sulfate and heparin., as part of a novel viral mechanism used by Porcine adenovirus A for attacking a host. Accordingly, utilities of VGAM17 include diagnosis, prevention and treatment of viral infection by Porcine adenovirus A.

[0384] The function of EXTL1 has been established by previous studies. The tumor suppressors EXT1 (133700) and EXT2 (133701) are associated with hereditary multiple exostoses and encode bifunctional glycosyltransferases essential for chain polymerization of heparan sulfate and its analog, heparin. Wise et al. (1997) identified another gene, termed EXTL by them, that showed striking sequence similarity to both EXT1 and EXT2 at the nucleotide and amino acid sequence levels. Although the mRNA transcribed from this gene is similar in size to that of EXT1 and EXT2, its pattern of expression was quite different. Of the 3 highly homologous EXT-like genes, EXTL1, EXTL2 (602411), and EXTL3 (605744), EXTL2 is an alpha-1,4-GlcNAc transferase I, the key enzyme that initiates the heparan sulfate/heparin synthesis. Kim et al. (2001) transiently expressed truncated forms of EXTL1 and EXTL3, lacking the putative NH2-terminal transmembrane and cytoplasmic domains, in COS-1 cells and found that the cells harbored alpha-GlcNAc transferase activity. Various results suggested that EXTL3 is most likely involved in both chain initiation and elongation, whereas EXTL1 is possibly involved only in the chain elongation of heparan sulfate, and perhaps of heparin as well. Thus, the acceptor specificities of the 5 family members are overlapping but distinct, except for EXT1 and EXT2, which have the same specificity. Thus, all of the 5 cloned human EXT gene family proteins harbor glycosyltransferase activities, which probably contribute to the synthesis of heparan sulfate and heparin. Xu et al. (1999) examined the EXTL1 and EXTL2 genes for the presence of germline mutations in hereditary multiple exostosis patients and found none. Hall et al. (2002) proposed the EXTL genes as candidates for second mutations leading to the development of exostoses. By radiation hybrid analysis and by fluorescence in situ hybridization, Wise et al. (1997) mapped EXTL to 1p36.1 between D1S458 and D1S511, a region that frequently shows loss of heterozygosity in a variety of tumor types.

[0385] Full details of the abovementioned studies are described in the following publications, the disclosure of which are hereby incorporated by reference:
[0386] ise, C. A.; Clines, G. A.; Massa, H.; Trask, B. J.; Lovett, M.: Identification and localization of the gene for EXTL, a third member of the multiple exostoses gene family. Genome Res. 7: 10-16, 1997. PubMed ID: 9037597 2. Kim, B.-T.; Kitagawa, H.; Tamura, J.; Saito, T.; Kusche-Gullberg, M.; Lindahl, U.; Sugahara, K.: Human tumor suppressor EXT gene family members EXTL1 and EXTL3 encode alpha-1,4-N-acetylglucosaminyltransferases that likely are involved in heparan sulfate/heparin biosynthesis. Proc. Nat. Acad. Sci. 98: 7176-7181, 2001.

[0387] Further studies establishing the function and utilities of EXTL1 are found in John Hopkins OMIM database record ID 601738, and in references numbered 16-19 listed hereinbelow.

[0388] Reference is now made to EXTL1 BINDING SITE. exostoses (multiple)-like 1 (EXTL1) is a host target gene of VGAM17, corresponding to VGAM17-HOST-TARGET GENE of FIG. 17A. EXTL1 BINDING SITE is a host binding site found in the 3′ untranslated region of EXTL1, corresponding to HOST BINDING SITE of FIG. 17A. FIG. 17D illustrates the complementarity of the nucleotide sequence of EXTL1 BINDING SITE, designated SEQ ID:25, to the nucleotide sequence of VGAM17 RNA of FIG. 17A, designated SEQ ID:23.

[0389] Yet another function of VGAM17 is therefore inhibition of exostoses (multiple)-like 1 (EXTL1), a host gene which encodes a Protein that probably contribute to the synthesis of heparan sulfate and heparin., as part of a novel viral mechanism used by Porcine adenovirus A for attacking a host. Accordingly, utilities of VGAM17 include diagnosis, prevention and treatment of viral infection by Porcine adenovirus A.

[0390] The function of EXTL1 has been established by previous studies. The tumor suppressors EXT1 (133700) and EXT2 (133701) are associated with hereditary multiple exostoses and encode bifunctional glycosyltransferases essential for chain polymerization of heparan sulfate and its analog, heparin. Wise et al. (1997) identified another gene, termed EXTL by them, that showed striking sequence similarity to both EXT1 and EXT2 at the nucleotide and amino acid sequence levels. Although the mRNA transcribed from this gene is similar in size to that of EXT1 and EXT2, its pattern of expression was quite different. Of the 3 highly homologous EXT-like genes, EXTL1, EXTL2 (602411), and EXTL3 (605744), EXTL2 is an alpha-1,4-GlcNAc transferase I, the key enzyme that initiates the heparan sulfate/heparin synthesis. Kim et al. (2001) transiently expressed truncated forms of EXTL1 and EXTL3, lacking the putative NH2-terminal transmembrane and cytoplasmic domains, in COS-1 cells and found that the cells harbored alpha-GlcNAc transferase activity. Various results suggested that EXTL3 is most likely involved in both chain initiation and elongation, whereas EXTL1 is possibly involved only in the chain elongation of heparan sulfate, and perhaps of heparin as well. Thus, the acceptor specificities of the 5 family members are overlapping but distinct, except for EXT1 and EXT2, which have the same specificity. Thus, all of the 5 cloned human EXT gene family proteins harbor glycosyltransferase activities, which probably contribute to the synthesis of heparan sulfate and heparin. Xu et al. (1999) examined the EXTL1 and EXTL2 genes for the presence of germline mutations in hereditary multiple exostosis patients and found none. Hall et al. (2002) proposed the EXTL genes as candidates for second mutations leading to the development of exostoses. By radiation hybrid analysis and by fluorescence in situ hybridization, Wise et al. (1997) mapped EXTL to 1p36.1 between D1S458 and D1S511, a region that frequently shows loss of heterozygosity in a variety of tumor types.

[0391] Full details of the abovementioned studies are described in the following publications, the disclosure of which are hereby incorporated by reference:
[0392] ise, C. A.; Clines, G. A.; Massa, H.; Trask, B. J.; Lovett, M.: Identification and localization of the gene for EXTL, a third member of the multiple exostoses gene family. Genome Res. 7: 10-16, 1997. PubMed ID: 9037597 2. Kim, B.-T.; Kitagawa, H.; Tamura, J.; Saito, T.; Kusche-Gullberg, M.; Lindahl, U.; Sugahara, K.: Human tumor suppressor EXT gene family members EXTL1 and EXTL3 encode alpha-1,4-N-acetylgluco saminyltransferases that likely are involved in heparan sulfate/heparin biosynthesis. Proc. Nat. Acad. Sci. 98: 7176-7181, 2001.

[0393] Further studies establishing the function and utilities of EXTL1 are found in John Hopkins OMIM database record ID 601738, and in references numbered 16-19 listed hereinbelow.

[0394] Reference is now made to EXTL1 BINDING SITE. exostoses (multiple)-like 1 (EXTL1) is a host target gene of VGAM17, corresponding to VGAM17-HOST-TARGET GENE of FIG. 17A. EXTL1 BINDING SITE is a host binding site found in the 3′ untranslated region of EXTL1, corresponding to HOST BINDING SITE of FIG. 17A. FIG. 17D illustrates the complementarity of the nucleotide sequence of EXTL1 BINDING SITE, designated SEQ ID:25, to the nucleotide sequence of VGAM17 RNA of FIG. 17A, designated SEQ ID:23.

[0395] Yet another function of VGAM17 is therefore inhibition of exostoses (multiple)-like 1 (EXTL1), a host gene which encodes a Protein that probably contribute to the synthesis of heparan sulfate and heparin., as part of a novel viral mechanism used by Porcine adenovirus A for attacking a host. Accordingly, utilities of VGAM17 include diagnosis, prevention and treatment of viral infection by Porcine adenovirus A.

[0396] The function of EXTL1 has been established by previous studies. The tumor suppressors EXT1 (133700) and EXT2 (133701) are associated with hereditary multiple exostoses and encode bifunctional glycosyltransferases essential for chain polymerization of heparan sulfate and its analog, heparin. Wise et al. (1997) identified another gene, termed EXTL by them, that showed striking sequence similarity to both EXT1 and EXT2 at the nucleotide and amino acid sequence levels. Although the mRNA transcribed from this gene is similar in size to that of EXT1 and EXT2, its pattern of expression was quite different. Of the 3 highly homologous EXT-like genes, EXTL1, EXTL2 (602411), and EXTL3 (605744), EXTL2 is an alpha-1,4-GlcNAc transferase I, the key enzyme that initiates the heparan sulfate/heparin synthesis. Kim et al. (2001) transiently expressed truncated forms of EXTL1 and EXTL3, lacking the putative NH2-terminal transmembrane and cytoplasmic domains, in COS-1 cells and found that the cells harbored alpha-GlcNAc transferase activity. Various results suggested that EXTL3 is most likely involved in both chain initiation and elongation, whereas EXTL1 is possibly involved only in the chain elongation of heparan sulfate, and perhaps of heparin as well. Thus, the acceptor specificities of the 5 family members are overlapping but distinct, except for EXT1 and EXT2, which have the same specificity. Thus, all of the 5 cloned human EXT gene family proteins harbor glycosyltransferase activities, which probably contribute to the synthesis of heparan sulfate and heparin. Xu et al. (1999) examined the EXTL1 and EXTL2 genes for the presence of germline mutations in hereditary multiple exostosis patients and found none. Hall et al. (2002) proposed the EXTL genes as candidates for second mutations leading to the development of exostoses. By radiation hybrid analysis and by fluorescence in situ hybridization, Wise et al. (1997) mapped EXTL to 1p36.1 between D1S458 and D1S511, a region that frequently shows loss of heterozygosity in a variety of tumor types.

[0397] Full details of the abovementioned studies are described in the following publications, the disclosure of which are hereby incorporated by reference:
[0398] ise, C. A.; Clines, G. A.; Massa, H.; Trask, B. J.; Lovett, M.: Identification and localization of the gene for EXTL, a third member of the multiple exostoses gene family. Genome Res. 7: 10-16, 1997. PubMed ID: 9037597 2. Kim, B.-T.; Kitagawa, H.; Tamura, J.; Saito, T.; Kusche-Gullberg, M.; Lindahl, U.; Sugahara, K.: Human tumor suppressor EXT gene family members EXTL1 and EXTL3 encode alpha-1,4-N-acetylgluco saminyltransferases that likely are involved in heparan sulfate/heparin biosynthesis. Proc. Nat. Acad. Sci. 98: 7176-7181, 2001.

[0399] Further studies establishing the function and utilities of EXTL1 are found in John Hopkins OMIM database record ID 601738, and in references numbered 16-19 listed hereinbelow.

[0400] Reference is now made to EXTL1 BINDING SITE. exostoses (multiple)-like 1 (EXTL1) is a host target gene of VGAM17, corresponding to VGAM17-HOST-TARGET GENE of FIG. 17A. EXTL1 BINDING SITE is a host binding site found in the 3′ untranslated region of EXTL1, corresponding to HOST BINDING SITE of FIG. 17A. FIG. 17D illustrates the complementarity of the nucleotide sequence of EXTL1 BINDING SITE, designated SEQ ID:25, to the nucleotide sequence of VGAM17 RNA of FIG. 17A, designated SEQ ID:23.

[0401] Yet another function of VGAM17 is therefore inhibition of exostoses (multiple)-like 1 (EXTL1), a host gene which encodes a Protein that probably contribute to the synthesis of heparan sulfate and heparin., as part of a novel viral mechanism used by Porcine adenovirus A for attacking a host. Accordingly, utilities of VGAM17 include diagnosis, prevention and treatment of viral infection by Porcine adenovirus A.

[0402] The function of EXTL1 has been established by previous studies. The tumor suppressors EXT1 (133700) and EXT2 (133701) are associated with hereditary multiple exostoses and encode bifunctional glycosyltransferases essential for chain polymerization of heparan sulfate and its analog, heparin. Wise et al. (1997) identified another gene, termed EXTL by them, that showed striking sequence similarity to both EXT1 and EXT2 at the nucleotide and amino acid sequence levels. Although the mRNA transcribed from this gene is similar in size to that of EXT1 and EXT2, its pattern of expression was quite different. Of the 3 highly homologous EXT-like genes, EXTL1, EXTL2 (602411), and EXTL3 (605744), EXTL2 is an alpha-1,4-GlcNAc transferase I, the key enzyme that initiates the heparan sulfate/heparin synthesis. Kim et al. (2001) transiently expressed truncated forms of EXTL1 and EXTL3, lacking the putative NH2-terminal transmembrane and cytoplasmic domains, in COS-1 cells and found that the cells harbored alpha-GlcNAc transferase activity. Various results suggested that EXTL3 is most likely involved in both chain initiation and elongation, whereas EXTL1 is possibly involved only in the chain elongation of heparan sulfate, and perhaps of heparin as well. Thus, the acceptor specificities of the 5 family members are overlapping but distinct, except for EXT1 and EXT2, which have the same specificity. Thus, all of the 5 cloned human EXT gene family proteins harbor glycosyltransferase activities, which probably contribute to the synthesis of heparan sulfate and heparin. Xu et al. (1999) examined the EXTL1 and EXTL2 genes for the presence of germline mutations in hereditary multiple exostosis patients and found none. Hall et al. (2002) proposed the EXTL genes as candidates for second mutations leading to the development of exostoses. By radiation hybrid analysis and by fluorescence in situ hybridization, Wise et al. (1997) mapped EXTL to 1p36.1 between D1S458 and D1S511, a region that frequently shows loss of heterozygosity in a variety of tumor types.

[0403] Full details of the abovementioned studies are described in the following publications, the disclosure of which are hereby incorporated by reference:
[0404] ise, C. A.; Clines, G. A.; Massa, H.; Trask, B. J.; Lovett, M.: Identification and localization of the gene for EXTL, a third member of the multiple exostoses gene family. Genome Res. 7: 10-16, 1997. PubMed ID: 9037597 2. Kim, B.-T.; Kitagawa, H.; Tamura, J.; Saito, T.; Kusche-Gullberg, M.; Lindahl, U.; Sugahara, K.: Human tumor suppressor EXT gene family members EXTL1 and EXTL3 encode alpha-1,4-N-acetylgluco saminyltransferases that likely are involved in heparan sulfate/heparin biosynthesis. Proc. Nat. Acad. Sci. 98: 7176-7181, 2001.

[0405] Further studies establishing the function and utilities of EXTL1 are found in John Hopkins OMIM database record ID 601738, and in references numbered 16-19 listed hereinbelow.

[0406] Reference is now made to EXTL1 BINDING SITE. exostoses (multiple)-like 1 (EXTL1) is a host target gene of VGAM17, corresponding to VGAM17-HOST-TARGET GENE of FIG. 17A. EXTL1 BINDING SITE is a host binding site found in the 3′ untranslated region of EXTL1, corresponding to HOST BINDING SITE of FIG. 17A. FIG. 17D illustrates the complementarity of the nucleotide sequence of EXTL1 BINDING SITE, designated SEQ ID:25, to the nucleotide sequence of VGAM17 RNA of FIG. 17A, designated SEQ ID:23.

[0407] Yet another function of VGAM17 is therefore inhibition of exostoses (multiple)-like 1 (EXTL1), a host gene which encodes a Protein that probably contribute to the synthesis of heparan sulfate and heparin., as part of a novel viral mechanism used by Porcine adenovirus A for attacking a host. Accordingly, utilities of VGAM17 include diagnosis, prevention and treatment of viral infection by Porcine adenovirus A.

[0408] The function of EXTL1 has been established by previous studies. The tumor suppressors EXT1 (133700) and EXT2 (133701) are associated with hereditary multiple exostoses and encode bifunctional glycosyltransferases essential for chain polymerization of heparan sulfate and its analog, heparin. Wise et al. (1997) identified another gene, termed EXTL by them, that showed striking sequence similarity to both EXT1 and EXT2 at the nucleotide and amino acid sequence levels. Although the mRNA transcribed from this gene is similar in size to that of EXT1 and EXT2, its pattern of expression was quite different. Of the 3 highly homologous EXT-like genes, EXTL1, EXTL2 (602411), and EXTL3 (605744), EXTL2 is an alpha-1,4-GlcNAc transferase I, the key enzyme that initiates the heparan sulfate/heparin synthesis. Kim et al. (2001) transiently expressed truncated forms of EXTL1 and EXTL3, lacking the putative NH2-terminal transmembrane and cytoplasmic domains, in COS-1 cells and found that the cells harbored alpha-GlcNAc transferase activity. Various results suggested that EXTL3 is most likely involved in both chain initiation and elongation, whereas EXTL1 is possibly involved only in the chain elongation of heparan sulfate, and perhaps of heparin as well. Thus, the acceptor specificities of the 5 family members are overlapping but distinct, except for EXT1 and EXT2, which have the same specificity. Thus, all of the 5 cloned human EXT gene family proteins harbor glycosyltransferase activities, which probably contribute to the synthesis of heparan sulfate and heparin. Xu et al. (1999) examined the EXTL1 and EXTL2 genes for the presence of germline mutations in hereditary multiple exostosis patients and found none. Hall et al. (2002) proposed the EXTL genes as candidates for second mutations leading to the development of exostoses. By radiation hybrid analysis and by fluorescence in situ hybridization, Wise et al. (1997) mapped EXTL to 1p36.1 between D1S458 and D1S511, a region that frequently shows loss of heterozygosity in a variety of tumor types.

[0409] Full details of the abovementioned studies are described in the following publications, the disclosure of which are hereby incorporated by reference:
[0410] ise, C. A.; Clines, G. A.; Massa, H.; Trask, B. J.; Lovett, M.: Identification and localization of the gene for EXTL, a third member of the multiple exostoses gene family. Genome Res. 7: 10-16, 1997. PubMed ID: 9037597 2. Kim, B.-T.; Kitagawa, H.; Tamura, J.; Saito, T.; Kusche-Gullberg, M.; Lindahl, U.; Sugahara, K.: Human tumor suppressor EXT gene family members EXTL1 and EXTL3 encode alpha-1,4-N-acetylgluco saminyltransferases that likely are involved in heparan sulfate/heparin biosynthesis. Proc. Nat. Acad. Sci. 98: 7176-7181, 2001.

[0411] Further studies establishing the function and utilities of EXTL1 are found in John Hopkins OMIM database record ID 601738, and in references numbered 16-19 listed hereinbelow.

[0412] Reference is now made to FIG. 18A, which is a simplified diagram providing a conceptual explanation of the mode by which a novel bioinformatically detected viral gene, referred to here as Viral Genomic Address Messenger 18 (VGAM18) modulates expression of host target genes thereof, the function and utility of which host target genes is known in the art.

[0413] VGAM18 is a novel bioinformatically detected regulatory, non protein coding, viral micro RNA (miRNA) gene. The method by which VGAM18 was detected is described hereinabove with reference to FIGS. 2-8.

[0414] VGAM18 GENE is a viral gene contained in the genome of Equine herpesvirus 2. VGAM18-HOST TARGET GENE is a human gene contained in the human genome.

[0415] VGAM18 GENE encodes a VGAM18 PRECURSOR RNA. Similar to other miRNA genes, and unlike most ordinary genes, the RNA transcribed by VGAM18, VGAM18 PRECURSOR RNA, does not encoded a protein.

[0416] VGAM18 PRECURSOR RNA folds onto itself, forming VGAM18 FOLDED PRECURSOR RNA. As FIG. 18 illustrates, VGAM18 FOLDED PRECURSOR RNA forms a ‘hairpin structure’, folding onto itself. As is well known in the art, this ‘hairpin structure’, is typical of RNA encoded by miRNA genes, and is due to the fact that the nucleotide sequence of the first half of the RNA encoded by a miRNA gene is an accurate or partial inversed-reversed sequence of the nucleotide sequence of the second half thereof. By “inversed-reversed” is meant a sequence which is reversed and wherein each nucleotide is replaced by a complimentary nucleotide, as is well known in the art (e.g. ATGGC is the inversed-reversed sequence of GCCAT).

[0417] An enzyme complex designated DICER COMPLEX, ‘dices’ the VGAM18 FOLDED PRECURSOR RNA into a single stranded ˜22 nt long RNA segment, designated VGAM18 RNA. As is known in the art, ‘dicing’ of a hairpin structured RNA precursor product into short a ˜22 nt RNA segment is catalyzed by an enzyme complex comprising an enzyme called Dicer together with other necessary proteins.

[0418] VGAM18-HOST TARGET GENE encodes a corresponding messenger RNA, designated VGAM18-HOST-TARGET RNA. VGAM18-HOST-TARGET RNA comprises three regions, as is typical of mRNA of a protein coding gene: a 5′ untranslated region, a protein coding region and a 3′ untranslated region, designated 5′UTR, PROTEIN CODING and 3′UTR respectively.

[0419] VGAM18 RNA binds complimentarily to a HOST BINDING SITE, located on an untranslated region of VGAM18-HOST-TARGET RNA. This complimentarily binding is due to the fact that the nucleotide sequence of VGAM18 RNA is an accurate or a partial inversed-reversed sequence of the nucleotide sequence of HOST BINDING SITE. It is appreciated that while FIG. 18A depicts the HOST BINDING SITE on the 3′UTR region, this is meant as an example only—the HOST BINDING SITE may be located on the 5′UTR region as well.

[0420] The complimentary binding of VGAM18 RNA to HOST BINDING SITE inhibits translation of VGAM18-HOST-TARGET RNA into VGAM18-HOST-TARGET PROTEIN. VGAM18-HOST-TARGET PROTEIN is therefore outlined by a broken line.

[0421] It is appreciated that VGAM18-HOST-TARGET GENE in fact represents a plurality of host target genes of VGAM18. The mRNA of each of this plurality of host target genes of VGAM18 comprises a HOST BINDING SITE, having a nucleotide sequence which is at least partly complementary to VGAM18 RNA, and which when bound by VGAM18 RNA causes inhibition of translation of one of a plurality of host target proteins of VGAM18. The plurality of host target genes of VGAM18 and their respective host binding sites, are described hereinbelow with reference to FIG. 18D.

[0422] It is appreciated by one skilled in the art that the mode of translational inhibition illustrated by FIG. 18A with specific reference to translational inhibition exerted by VGAM18 on one or more host target genes of VGAM18, is in fact common to other known miRNA genes. As mentioned hereinabove with reference to the background section, although a specific complimentary binding site has been demonstrated only for miRNA genes Lin-4 and Let-7, all other recently discovered miRNA genes are also believed by those skilled in the art to modulate expression of other genes by complimentary binding, although specific complimentary binding sites of these genes have not yet been found (Ruvkun G., ‘Perspective: Glimpses of a tiny RNA world’, Science 294, 779 (2001)).

[0423] It is further appreciated that a function of VGAM18 is inhibition of expression of host target genes, as part of a novel viral mechanism of attacking a host. Accordingly, utilities of VGAM18 include diagnosis, prevention and treatment of viral infection by Equine herpesvirus 2.

[0424] Reference is now made to FIG. 18B which shows the nucleotide sequence of VGAM18 PRECURSOR RNA of FIG. 18A, designated SEQ ID:39, and a probable nucleotide sequence of VGAM18 RNA of FIG. 18A, designated SEQ ID:40. The nucleotide sequence of SEQ ID:40, which is highly likely (over 35%) to be identical or highly similar to that of VGAM18, is marked by an underline within the sequence of VGAM18 PRECURSOR RNA.

[0425] Reference is now made to FIG. 18C, which shows the secondary folding of VGAM18 PRECURSOR RNA, forming a ‘hairpin structure’ designated VGAM18 FOLDED PRECURSOR RNA, both of FIG. 18A. A probable (>35%) nucleotide sequence of VGAM18 RNA, designated SEQ ID:40 of FIG. 18B, is marked by an underline on VGAM18 FOLDED PRECURSOR RNA. It is appreciated that the complimentary base-paring is not perfect, with ‘bulges’, as is well known in the art with respect to the RNA folding of all known miRNA genes.

[0426] Reference is now made to FIG. 18D, which is a table showing binding sites found in untranslated regions of a plurality of host target genes of VGAM18, each binding site corresponding to HOST BINDING SITE of FIG. 18A, and their complementarity to SEQ ID:40, which is highly likely (>35%) to be identical or highly similar to the nucleotide sequence of VGAM18 RNA of FIG. 18A.

[0427] As mentioned hereinabove with reference to FIG. 18A a function of VGAM18 is inhibition of expression of host target genes, as part of a novel viral mechanism of attacking a host. Accordingly, utilities of VGAM18 include diagnosis, prevention and treatment of viral infection by Equine herpesvirus 2. It is appreciated that specific functions, and accordingly utilities, of VGAM18 correlate with, and may be deduced from, the identity of the host target genes which VGAM18 binds and inhibits, and the function of these host target genes, as elaborated hereinbelow.

[0428] Reference is now made to DIAPH2 BINDING SITE. diaphanous (Drosophila, homolog) 2 (DIAPH2) is a host target gene of VGAM18, corresponding to VGAM18-HOST-TARGET GENE of FIG. 18A. DIAPH2 BINDING SITE is a host binding site found in the 3′ untranslated region of DIAPH2, corresponding to HOST BINDING SITE of FIG. 18A. FIG. 18D illustrates the complementarity of the nucleotide sequence of DIAPH2 BINDING SITE, designated SEQ ID:41, to the nucleotide sequence of VGAM18 RNA of FIG. 18A, designated SEQ ID:40.

[0429] A function of VGAM18 is therefore inhibition of diaphanous (Drosophila, homolog) 2 (DIAPH2), a host gene which encodes a Protein that may affect in oogenesis and is associated with premature ovarian failure, as part of a novel viral mechanism used by Equine herpesvirus 2 for attacking a host. Accordingly, utilities of VGAM18 include diagnosis, prevention and treatment of viral infection by Equine herpesvirus 2.

[0430] The function of DIAPH2 has been established by previous studies. Mutant alleles of Drosophila dia affect spermatogenesis or oogenesis and lead to sterility. Bione et al. (1998) characterized a human homolog of ‘diaphanous’ and demonstrated that this gene, designated DIA, is interrupted by a breakpoint in a patient with familial premature ovarian failure (POF; 311360). A human EST, DRES25, which showed significant homology with the Drosophila gene, was mapped to Xq22 by fluorescence in situ hybridization. Bione et al. (1998) found that the human DIA open reading frame encodes a 1,101-amino acid protein approximately 39% identical to the Drosophila protein. Northern blot analysis of human adult and fetal tissues detected 4 transcripts, 3 of which are expressed ubiquitously and the fourth exclusively in adult testis. Bione et al. (1998) showed that the DIA gene is expressed in developing ovaries and testis of the mouse, as well as in all other tissues, from the E16 stage. Banfi et al. (1997) had indicated that a human homolog of ‘diaphanous’ maps to Xq22. Lynch et al. (1997) noted that a nonsyndromic form of X-linked deafness, DFN2 (304500), also maps to Xq22, making this homologous gene a candidate for DFN2 hearing loss. In the family of patient BC studied by Sala et al. (1997), a balanced X;12 translocation, t(X;12)(q21;p1.3), was associated with premature ovarian failure (311360). Patient BC had secondary amenorrhea, with no other associated features, at the age of 17 years. Her mother, who carried the same chromosomal rearrangement, was diagnosed with premature menopause at the age of 32 years. At diagnosis, both mother and daughter had high gonadotropin levels and inactivation of the normal X chromosome (Philippe et al., 1993). The breakpoint was mapped, by FISH, to a specific YAC. The translocation breakpoint was found to be in the last 200-kb intron of the gene.

[0431] Full details of the abovementioned studies are described in the following publications, the disclosure of which are hereby incorporated by reference:
[0432] ione, S.; Sala, C.; Manzini, C.; Arrigo, G.; Zuffardi, O.; Banfi, S.; Borsani, G.; Jonveaux, P.; Philippe, C.; Zuccotti, M.; Ballabio, A.; Toniolo, D.: A human homologue of the Drosophila melanogaster diaphanous gene is disrupted in a patient with premature ovarian failure: evidence for conserved function in oogenesis and implications for human sterility. Am. J. Hum. Genet. 62: 533-541, 1998. PubMed ID: 9497258 5. Philippe, C.; Cremers, F. P. M.; Chery, M.; Bach, I.; Abbadi, N.; Ropers, H. H.; Gilgenkrantz, S.: Physical mapping of DNA markers in the q13-q22 region of the human X chromosome. Genomics 17: 147-152, 1993.

[0433] Further studies establishing the function and utilities of DIAPH2 are found in John Hopkins OMIM database record ID 300108, and in references numbered 20-25 listed hereinbelow.

[0434] Reference is now made to EPHB2 BINDING SITE. EphB2 (EPHB2) is a host target gene of VGAM18, corresponding to VGAM18-HOST TARGET GENE of FIG. 18A. EPHB2 BINDING SITE is a host binding site found in the 3′ untranslated region of EPHB2, corresponding to HOST BINDING SITE of FIG. 18A. FIG. 18D illustrates the complementarity of the nucleotide sequence of EPHB2 BINDING SITE, designated SEQ ID:42, to the nucleotide sequence of VGAM18 RNA of FIG. 18A, designated SEQ ID:40.

[0435] Yet another function of VGAM18 is therefore inhibition of EphB2 (EPHB2), a host gene which encodes a receptor that Eph-related receptor tyrosine kinase B2; may have a role in neurogenesis., as part of a novel viral mechanism used by Equine herpesvirus 2 for attacking a host. Accordingly, utilities of VGAM18 include diagnosis, prevention and treatment of viral infection by Equine herpesvirus 2.

[0436] The function of EPHB2 has been established by previous studies. See 179610 for background on Eph receptors and their ligands, the ephrins. Chan and Watt (1991) cloned partial sequences of the EEK (EPHA8; 176945) and ERK genes encoding members of the EPH subclass of receptor protein-tyrosine kinases. Northern blot analysis of rat RNA showed that DNA encoding human ERK hybridized to transcripts most abundantly in lung. By screening a human fetal brain cDNA expression library using a monoclonal antiphosphotyrosine antibody and by 5-prime RACE (rapid amplification of cDNA ends) procedures, Ikegaki et al. (1995) isolated overlapping cDNAs encoding a receptor-type tyrosine kinase belonging to the EPH family and designated the gene DRT (for developmentally regulated EPH-related tyrosine kinase). The DRT gene is expressed in transcripts of 3 different sizes (4, 5, and 11 kb). The DRT transcripts are expressed in human brain and several other tissues, including heart, lung, kidney, placenta, pancreas, liver, and skeletal muscle, but the 11-kb DRT transcript is preferentially expressed in fetal brain. Steady-state levels of DRT mRNA in several tissues, including brain, heart, lung, and kidney, are greater in the midterm fetus than those in the adult. Ikegaki et al. (1995) showed that a large number of tumor cell lines derived from neuroectoderm express DRT transcripts. The authors speculated that DRT may play a part in human neurogenesis. Using a yeast 2-hybrid system, Cowan et al. (2000) demonstrated that PDZ domain-containing protein Pick1 (PRKCABP; 605926) binds the C-terminal tail of EphB2. Using colocalization studies and biochemical analysis, they demonstrated that a protein complex containing EphB2 and aquaporin-1 (AQP1; 107776) is formed in vivo. They concluded that Ephb2 may regulate ionic homeostasis and endolymph fluid production through macromolecular associations with membrane channels that transport chloride, bicarbonate, and water. Chan and Watt (1991) mapped the EEK and ERK genes to chromosome 1 by Southern blot analysis of somatic cell hybrids. Ikegaki et al. (1995) mapped DRT, the EPHB2 gene, to 1p36.1-p35 by PCR screening of human/rodent somatic cell hybrid panels and by fluorescence in situ hybridization. As the distal end of 1p is often deleted in neuroblastomas, the DRT gene may play a role in neuroblastoma and small cell lung carcinoma (SCLC) tumorigenesis. By fluorescence in situ hybridization, Saito et al. (1995) demonstrated that the ERK gene is located in chromosomal region 1p36.1. They showed that the homologous genes are located on mouse 4D2.2-D3 and rat 5q36.13, both of which are regions with conserved linkage homology to human chromosome 1p.

[0437] Animal model experiments lend further support to the function of EPHB2. Halford et al. (2000) generated mice deficient in Ryk (600524) and found that they had a distinctive craniofacial appearance, shortened limbs, and postnatal mortality due to feeding and respiratory complications associated with a complete cleft of the secondary palate. Consistent with cleft palate phenocopy in Ephb2/Ephb3 (601839)-deficient mice and the role of a Drosophila Ryk ortholog, ‘Derailed,’ in the transduction of repulsive axon pathfinding cues, biochemical data implicated Ryk in signaling mediated by Eph receptors and cell junction-associated Af6 (159559). Halford et al. (2000) concluded that their findings highlighted the importance of signal crosstalk between members of different RTK subfamilies.

[0438] It is appreciated that the abovementioned animal model for EPHB2 is acknowledged by those skilled in the art as a scientifically valid animal model, as can be further appreciated from the publications sited hereinbelow.

[0439] Full details of the abovementioned studies are described in the following publications, the disclosure of which are hereby incorporated by reference:
[0440] Ikegaki, N.; Tang, X. X.; Liu, X.-G.; Biegel, J. A.; Allen, C.; Yoshioka, A.; Sulman, E. P.; Brodeur, G. M.; Pleasure, D. E.: Molecular characterization and chromosomal localization of DRT (EPHT3): a developmentally regulated human protein-tyrosine kinase gene of the EPH family. Hum. Molec. Genet. 4: 2033-2045, 1995. PubMed ID: 8589679 6. Halford, M. M.; Armes, J.; Buchert, M.; Meskenaite, V.; Grail, D.; Hibbs, M. L.; Wilks, A. F.; Farlie, P. G.; Newgreen, D. F.; Hovens, C. M.; Stacker, S. A.: Ryk-deficient mice exhibit craniofacial defects associated with perturbed Eph receptor crosstalk. Nature Genet. 25: 414-418, 2000.

[0441] Further studies establishing the function and utilities of EPHB2 are found in John Hopkins OMIM database record ID 600997, and in references numbered 4 and 26-37 listed hereinbelow.

[0442] Reference is now made to LYN BINDING SITE. v-yes-1 Yamaguchi sarcoma viral related oncogene homolog (LYN) is a host target gene of VGAM18, corresponding to VGAM18-HOST TARGET GENE of FIG. 18A. LYN BINDING SITE is a host binding site found in the 3′ untranslated region of LYN, corresponding to HOST BINDING SITE of FIG. 18A. FIG. 18D illustrates the complementarity of the nucleotide sequence of LYN BINDING SITE, designated SEQ ID:43, to the nucleotide sequence of VGAM18 RNA of FIG. 18A, designated SEQ ID:40.

[0443] An additional function of VGAM18 is therefore inhibition of v-yes-1 Yamaguchi sarcoma viral related oncogene homolog (LYN), a host gene which encodes a transcripition factor that is a Tyrosine kinase with similarity to murine tyrosine kinase p56lck; similar to v-yes protein and the gene products of v-fgr and v-src, as part of a novel viral mechanism used by Equine herpesvirus 2 for attacking a host. Accordingly, utilities of VGAM18 include diagnosis, prevention and treatment of viral infection by Equine herpesvirus 2.

[0444] The function of LYN has been established by previous studies. Parravicini et al. (2002) noted that Lyn deficiency impairs some mast cell functions, but degranulation and cytokine production are intact. In Gab2 (606203)-deficient mice, on the other hand, degranulation and cytokine production are impaired. Using immunoblot analysis, they showed that although Lyn is essential for Syk (600085) activation and Lat (602354) phosphorylation after Fcer1 (see FCER1G; 147139) aggregation, neither Lyn nor Lat are necessary for Gab2 phosphorylation. RT-PCR and coimmunoprecipitation analyses demonstrated abundant Fyn (137025) expression in mast cells and an association with Gab2. In cells lacking Fyn, neither Gab2 nor Akt (164730) were phosphorylated. Functional analysis showed that Lyn −/− mast cells exhibited hyperdegranulation and enhanced PI3K (see 601232) activity and Akt phosphorylation, whereas in Fyn −/− mast cells the degranulation response was inhibited. The inhibition was associated with decreased binding of PI3K with Gab2. Parravicini et al. (2002) observed that the degranulation response was independent of Fcer1 stimulation in Fyn-deficient mast cells and that degranulation was dependent on PI3K in wildtype and mutant cell lines. The degranulation response was dependent on a rise in intracellular calcium that was inhibited in Lyn-deficient mast cells but intact in Fyn-deficient cells. Degranulation proceeded in Lyn −/− cells due to increased activation and constitutive phosphorylation of the calcium-independent protein kinase C delta isoform (PRKCD; 176977). Parravicini et al. (2002) concluded that Fyn- and Lyn-initiated pathways synergize in late events at the level of protein kinase C and calcium, respectively, to regulate mast cell degranulation.

[0445] Animal model experiments lend further support to the function of LYN. Hibbs et al. (1995) demonstrated that mice homozygous for a disruption of the Lyn locus display abnormalities associated with the B-lymphocyte lineage and in mast cell function. Despite reduced numbers of recirculating B lymphocytes, the homozygous deficient mice are immunoglobulin M hyperglobulinemic. Lyn-deficient mice show IgM hyperglobulinemia. Immune responses to T-independent and T-dependent antigens were affected. The deficient mice failed to mediate an allergic response to IgE cross-linking, indicating that activation of Lyn plays an indispensable role in signaling by the high-affinity IgE receptor (FCER). Homozygous deficient mice had circulating autoreactive antibodies, and many showed severe glomerulonephritis caused by the deposition of IgG immune complexes in the kidney, a pathology reminiscent of systemic lupus erythematosus. Hibbs et al. (1995) stated that, collectively, these results implicated LYN as having an indispensable role in immunoglobulin-mediated signaling, particularly in establishing B cell tolerance. Harder et al. (2001) generated mice with a gain-of-function Lyn mutation (tyr508 to phe, which they referred to as ‘up’) analogous to the tyr527-to-phe activating mutation in the mouse Src gene (190090) (Webster et al., 1995). Even aging mice with the Lyn up/up phenotype did not display hematologic malignancies, unlike Lyn −/− mice, which developed splenomegaly, increased myeloid progenitors, and monocyte/macrophage tumors. Biochemical analysis revealed that Lyn is essential in establishing ITIM (immunoreceptor tyrosine-based inhibitory motif)-dependent signaling and for the activation of specific protein tyrosine phosphatases within myeloid cells, which may underlie the susceptibility of Lyn −/− mice to tumorigenesis. Hasegawa et al. (2001) generated mice deficient in both Cd19 (107265) and Lyn. Cd19 deficiency

[0446] It is appreciated that the abovementioned animal model for LYN is acknowledged by those skilled in the art as a scientifically valid animal model, as can be further appreciated from the publications sited hereinbelow.

[0447] Full details of the abovementioned studies are described in the following publications, the disclosure of which are hereby incorporated by reference:
[0448] Harder, K. W.; Parsons, L. M.; Armes, J.; Evans, N.; Kountouri, N.; Clark, R.; Quillici, C.; Grail, D.; Hodgson, G. S.; Dunn, A. R.; Hibbs, M. L.: Gain- and loss-of-function Lyn mutant mice define a critical inhibitory role for Lyn in the myeloid lineage. Immunity 15: 603-615, 2001. PubMed ID: 11672542 Parravicini, V.; Gadina, M.; Kovarova, M.; Odom, S.; Gonzalez-Espinosa, C.; Furumoto, Y.; Saitoh, S.; Samelson, L. E.; O'Shea, J. J.; Rivera, J.: Fyn kinase initiates complementary signals required for IgE-dependent mast cell degranulation. Nature Immun. 3: 741-748, 2002.

[0449] Further studies establishing the function and utilities of LYN are found in John Hopkins OMIM database record ID 165120, and in references numbered 38-43 listed hereinbelow.

[0450] Reference is now made to NRIP1 BINDING SITE. nuclear receptor interacting protein 1 (NRIP1) is a host target gene of VGAM18, corresponding to VGAM18-HOST-TARGET GENE of FIG. 18A. NRIP1 BINDING SITE is a host binding site found in the 3′ untranslated region of NRIP1, corresponding to HOST BINDING SITE of FIG. 18A. FIG. 18D illustrates the complementarity of the nucleotide sequence of NRIP1 BINDING SITE, designated SEQ ID:44, to the nucleotide sequence of VGAM18 RNA of FIG. 18A, designated SEQ ID:40.

[0451] A further function of VGAM18 is therefore inhibition of nuclear receptor interacting protein 1 (NRIP1), a host gene which encodes a Protein that modulates transcriptional activation by the estrogen receptor., as part of a novel viral mechanism used by Equine herpesvirus 2 for attacking a host. Accordingly, utilities of VGAM18 include diagnosis, prevention and treatment of viral infection by Equine herpesvirus 2.

[0452] The function of NRIP1 has been established by previous studies. Cavailles et al. (1995) identified the receptor-interacting protein 140 (RIP140) by virtue of its direct association with a transcriptional activation domain of the estrogen receptor (ESR; 133430) in the presence of estrogen; by fluorescence in situ hybridization with a cDNA clone, they mapped the gene to 21q11. Katsanis et al. (1998) used hybrids, YACs, and PACs to place the RIP140 gene on the physical map of chromosome 21; 21q11 is a gene-poor region.

[0453] Full details of the abovementioned studies are described in the following publications, the disclosure of which are hereby incorporated by reference:
[0454] availles, V.; Dauvois, S.; Horset, L. F.; Lopez, G.; Hoare, S.; Kushner, P. J.; Parker, M. G.: Nuclear factor RIP140 modulates transcriptional activation by the estrogen receptor. EMBO J. 14: 3741-3751, 1995. PubMed ID: 7641693 2. Katsanis, N.; Ives, J. H.; Groet, J.; Nizetic, D.; Fisher, E. M. C.: Localisation of receptor interacting protein 140 (RIP140) within 100 kb of D21S13 on 21q11, a gene-poor region of the human genome. Hum. Genet. 102: 221-223, 1998.

[0455] Further studies establishing the function and utilities of NRIP1 are found in John Hopkins OMIM database record ID 602490, and in references numbered 44-45 listed hereinbelow.

[0456] Reference is now made to PCTP BINDING SITE. phosphatidylcholine transfer protein (PCTP) is a host target gene of VGAM18, corresponding to VGAM18-HOST TARGET GENE of FIG. 18A. PCTP BINDING SITE is a host binding site found in the 3′ untranslated region of PCTP, corresponding to HOST BINDING SITE of FIG. 18A.

[0457] FIG. 18D illustrates the complementarity of the nucleotide sequence of PCTP BINDING SITE, designated SEQ ID:45, to the nucleotide sequence of VGAM18 RNA of FIG. 18A, designated SEQ ID:40.

[0458] Yet a further function of VGAM18 is therefore inhibition of phosphatidylcholine transfer protein (PCTP), a host gene which encodes a Enzyme that catalyzes the transfer of phosphatidylcholine between membranes (by similarity)., as part of a novel viral mechanism used by Equine herpesvirus 2 for attacking a host. Accordingly, utilities of VGAM18 include diagnosis, prevention and treatment of viral infection by Equine herpesvirus 2.

[0459] The function of PCTP has been established by previous studies. Phosphatidylcholine (PC) transfer protein (PCTP) is a cytosolic protein first purified from bovine and rat liver that catalyzes intermembrane transfer of PC. By searching an EST database for homologs of bovine Pctp, followed by 5-prime RACE and PCR of a kidney cDNA library, Cohen et al. (1999) obtained a cDNA encoding human PCTP. The deduced 214-amino acid human protein is 76% and 80% identical to bovine and rat Pctp, respectively. Northern blot analysis revealed wide expression of an approximately 2.3-kb PCTP transcript in all tissues tested except thymus. Highest expression was detected in liver, placenta, testis, kidney, and heart, and lowest levels were found in brain and lung.

[0460] Animal model experiments lend further support to the function of PCTP. Van Helvoort et al. (1999) disrupted the Pctp gene in mice. Pctp knockout mice showed no defects in the secretion of PC into bile or lung surfactant, and the lipid content and composition of bile and surfactant was normal. The authors concluded that PCTP does not play a major role in transporting PC from the endoplasmic reticulum, where it is synthesized, to the hepatocyte canalicular membrane.

[0461] It is appreciated that the abovementioned animal model for PCTP is acknowledged by those skilled in the art as a scientifically valid animal model, as can be further appreciated from the publications sited hereinbelow.

[0462] Full details of the abovementioned studies are described in the following publications, the disclosure of which are hereby incorporated by reference:
[0463] ohen, D. E.; Green, R. M.; Wu, M. K.; Beier, D. R.: Cloning, tissue-specific expression, gene structure and chromosomal localization of human phosphatidylcholine transfer protein. Biochim. Biophys. Acta 1447: 265-270, 1999. PubMed ID: 10542325 2. van Helvoort, A.; de Brouwer, A.; Ottenhoff, R.; Brouwers, J. F. H. M.; Wijnholds, J.; Beijnen, J. H.; Rijneveld, A.; van der Valk, M. A.; Majoor, D.; Voorhout, W.; Wirtz, K. W. A.; Elferink, R. P. J. O.; Borst, P.: Mice without phosphatidylcholine transfer protein have no defects in the secretion of phosphatidylcholine into bile or into lung airspaces. Proc. Nat. Acad. Sci. 96: 11501-11506, 1999.

[0464] Further studies establishing the function and utilities of PCTP are found in John Hopkins OMIM database record ID 606055, and in references numbered 46-47 listed hereinbelow.

[0465] Reference is now made to SMAP BINDING SITE. skeletal muscle abundant protein (SMAP) is a host target gene of VGAM18, corresponding to VGAM18-HOST-TARGET GENE of FIG. 18A. SMAP BINDING SITE is a host binding site found in the 3′ untranslated region of SMAP, corresponding to HOST BINDING SITE of FIG. 18A. FIG. 18D illustrates the complementarity of the nucleotide sequence of SMAP BINDING SITE, designated SEQ ID:46, to the nucleotide sequence of VGAM18 RNA of FIG. 18A, designated SEQ ID:40.

[0466] Another function of VGAM18 is therefore inhibition of skeletal muscle abundant protein (SMAP), a host gene which encodes a Protein that is required maternally for proper expression of other homeotic genes, as part of a novel viral mechanism used by Equine herpesvirus 2 for attacking a host. Accordingly, utilities of VGAM18 include diagnosis, prevention and treatment of viral infection by Equine herpesvirus 2.

[0467] The function of SMAP has been established by previous studies. Using a yeast 2-hybrid system, Shimizu et al. (1996) isolated the gene encoding a protein which interacts with smg GDS (see 179502) and named it SMAP, for ‘smg GDS-associated protein.’ The cDNA encodes a 792-amino acid polypeptide containing 9 Armadillo repeats, found in the Drosophila ‘Armadillo’ protein and implicated in protein-protein interactions. SMAP protein is phosphorylated by v-src (SRC; 190090), and this phosphorylation reduces the affinity of SMAP for smg GDS. Northern blot and tissue distribution analyses revealed that SMAP is expressed ubiquitously and is highly concentrated in the endoplasmic reticulum. Shimizu et al. (1996) also noted that SMAP is homologous to the sea urchin gene SpKAP115, an accessory subunit of sea urchin kinesin

[0468] Full details of the abovementioned studies are described in the following publications, the disclosure of which are hereby incorporated by reference:
[0469] Shimizu, K.; Kawabe, H.; Minimi, S.; Honda, T.; Takaishi, K.; Shirataki, H.; Takai, Y.: SMAP, an 5 mg GDS-associating protein having arm repeats and phosphorylated by Src tyrosine kinase. J. Biol. Chem. 271: 27013-27017, 1996.

[0470] Further studies establishing the function and utilities of SMAP are found in John Hopkins OMIM database record ID 601836, and in references numbered 48 listed hereinbelow.

[0471] Reference is now made to SORCS1 BINDING SITE. (SORCS1) is a host target gene of VGAM18, corresponding to VGAM18-HOST-TARGET GENE of FIG. 18A. SORCS1 BINDING SITE is a host binding site found in the 3′ untranslated region of SORCS1, corresponding to HOST BINDING SITE of FIG. 18A. FIG. 18D illustrates the complementarity of the nucleotide sequence of SORCS1 BINDING SITE, designated SEQ ID:47, to the nucleotide sequence of VGAM18 RNA of FIG. 18A, designated SEQ ID:40.

[0472] Yet another function of VGAM18 is therefore inhibition of (SORCS1), a host gene which encodes a Protein that is a member of the VPS10 domain containing receptor family, as part of a novel viral mechanism used by Equine herpesvirus 2 for attacking a host. Accordingly, utilities of VGAM18 include diagnosis, prevention and treatment of viral infection by Equine herpesvirus 2.

[0473] The function of SORCS1 has been established by previous studies. The VPS10 domain-containing receptors, including sortilin (SORT1; 602458) and sortilin-related receptor (SORL1; 602005), derive their name from the yeast vacuolar protein sorting protein-10, which is involved in sorting of carboxy-peptidase Y from the Golgi apparatus to the vacuole. By EST database searching with mouse sequence of 2 VPS10 proteins, S or CS1 and SorCS2 (606284) (Hermey et al., 1999; Rezgaoui et al., 2001), Hampe et al. (2001) identified 3 novel human VPS10 domain-containing receptors. Two were orthologs of mouse SORCS1 and SORCS2; the third was designated SORCS3 (606285). Hampe et al. (2001) noted that all mammalian VPS10 domains carry an N-terminal signal peptide for translocation into the endoplasmic reticulum. The greatest similarity between the receptors is found in the C-terminal parts of the VPS10 domains, which harbor 12 cysteine residues with a characteristic spacing conserved in all VPS10 proteins from yeast to man. SORCS1 and SORCS3 share the greatest homology. SORCS2 shares the same domain composition, but is less similar. SORT1 and SORTL1 lack the leucine-rich domain of the SORCS proteins, and their VPS10 domains are less related.

[0474] Full details of the abovementioned studies are described in the following publications, the disclosure of which are hereby incorporated by reference:
[0475] Rezgaoui, M.; Hermey, G.; Riedel, I. B.; Hampe, W.; Schaller, H. C.; Hermans-Borgmeyer, I.: Identification of S or CS2, a novel member of the VPS10 domain containing receptor family, prominently expressed in the developing mouse brain. Mech. Dev. 100: 335-338, 2001.

[0476] Further studies establishing the function and utilities of SORCS1 are found in John Hopkins OMIM database record ID 606283, and in references numbered 49-51 listed hereinbelow.

[0477] Reference is now made to TIMP3 BINDING SITE. tissue inhibitor of metalloproteinase 3 (Sorsby fundus dystrophy, pseu (TIMP3) is a host target gene of VGAM18, corresponding to VGAM18-HOST-TARGET GENE of FIG. 18A. TIMP3 BINDING SITE is a host binding site found in the 5′ untranslated region of TIMP3, corresponding to HOST BINDING SITE of FIG. 18A. FIG. 18D illustrates the complementarity of the nucleotide sequence of TIMP3 BINDING SITE, designated SEQ ID:48, to the nucleotide sequence of VGAM18 RNA of FIG. 18A, designated SEQ ID:40.

[0478] An additional function of VGAM18 is therefore inhibition of tissue inhibitor of metalloproteinase 3 (Sorsby fundus dystrophy, pseu (TIMP3), a host gene which encodes a Protein that is associated with Sorsby's fundus dystrophy, as part of a novel viral mechanism used by Equine herpesvirus 2 for attacking a host. Accordingly, utilities of VGAM18 include diagnosis, prevention and treatment of viral infection by Equine herpesvirus 2.

[0479] The function of TIMP3 has been established by previous studies. Osman et al. (2002) showed that mature dendritic cells (DCs) produce more MMP9 (120361) than do immature DCs, facilitating their hydroxaminic acid-inhibitable migration through gel in vitro and, presumably, through the extracellular matrix to monitor the antigenic environment in vivo. RT-PCR analysis indicated that the enhanced expression of MMP9 is correlated with a downregulation of TIMP1 and, particularly, TIMP2, while expression of TIMP3 is upregulated. The authors concluded that the balance of MMP and TIMP determines the net migratory capacity of DCs. They proposed that TIMP3 may be a marker for mature DCs. Langton et al. (1998) found that wildtype TIMP3 is localized entirely to the extracellular matrix (ECM) in both its glycosylated (27 kD) and unglycosylated (24 kD) forms. A COOH-terminally truncated TIMP3 molecule was found to be a non-ECM-bound matrix metalloproteinase (MMP) inhibitor, whereas a chimeric TIMP molecule, consisting of the NH2-terminal domain of TIMP2 fused to the COOH-terminal domain of TIMP3, displayed ECM binding, albeit with a lower affinity than the wildtype TIMP3 molecule. Thus, as in TIMP1 and TIMP2, the NH2-terminal domain is responsible for MMP inhibition, whereas the COOH-terminal domain is most important in mediating the specific functions of the molecule. A mutant TIMP3 in which serine-181 was changed to cysteine (188826.0001), found in Sorsby fundus dystrophy, gave rise to an additional 48-kD species (possibly a TIMP3 dimer) that retained its ability to inhibit MMPs and localize to the ECM when expressed in COS-7 cells. These data favored the hypothesis that the TIMP3 mutation seen in Sorsby fundus dystrophy contributes to disease progression by accumulation of mutant protein rather than by loss of functional TIMP3. Weber et al. (1994), who had mapped the gene for Sorsby fundus dystrophy (SFD; 1136900) to 22q13-qter, examined the TIMP3 gene as a possible site of causative mutations in SFD on the basis of its chromosomal location and its pivotal role in extracellular matrix remodeling. They identified point mutations in TIMP3 in affected members of 2 SFD pedigrees. These mutations were predicted to disrupt the tertiary structure and thus the functional properties of the mature protein.

[0480] Full details of the abovementioned studies are described in the following publications, the disclosure of which are hereby incorporated by reference:
[0481] sman, M.; Tortorella, M.; Londei, M.; Quaratino, S.: Expression of matrix metalloproteinases and tissue inhibitors of metalloproteinases define the migratory characteristics of human monocyte-derived dendritic cells. Immunology 105: 73-82, 2002. PubMed ID: 11849317 11. Weber, B. H. F.; Vogt, G.; Pruett, R. C.; Stohr, H.; Felbor, U.: Mutations in the tissue inhibitor metalloproteinases-3 (TIMP3) in patients with Sorsby's fundus dystrophy. Nature Genet. 8: 352-356, 1994.

[0482] Further studies establishing the function and utilities of TIMP3 are found in John Hopkins OMIM database record ID 188826, and in references numbered 52-64 listed hereinbelow.

[0483] Reference is now made to TRPS1 BINDING SITE. trichorhinophalangeal syndrome I (TRPS1) is a host target gene of VGAM18, corresponding to VGAM18-HOST-TARGET GENE of FIG. 18A. TRPS1 BINDING SITE is a host binding site found in the 3′ untranslated region of TRPS1, corresponding to HOST BINDING SITE of FIG. 18A. FIG. 18D illustrates the complementarity of the nucleotide sequence of TRPS1 BINDING SITE, designated SEQ ID:49, to the nucleotide sequence of VGAM18 RNA of FIG. 18A, designated SEQ ID:40.

[0484] A further function of VGAM18 is therefore inhibition of trichorhinophalangeal syndrome I (TRPS1), a host gene which encodes a transcripition factor that is associated with trichorhinophalangeal syndrome type I, type III, as part of a novel viral mechanism used by Equine herpesvirus 2 for attacking a host. Accordingly, utilities of VGAM18 include diagnosis, prevention and treatment of viral infection by Equine herpesvirus 2.

[0485] The function of TRPS1 has been established by previous studies. Trichorhinophalangeal syndrome type I (190350) is a malformation syndrome characterized by distinctive craniofacial and skeletal abnormalities and is inherited as an autosomal dominant. TRPS I patients have sparse scalp hair, bulbous tip of the nose, long flat philtrum, thin upper vermilion border, and protruding ears. Skeletal abnormalities include cone-shaped epiphyses at the phalanges, hip malformations, and short stature. Ludecke et al. (1995) and Hou et al. (1995) assigned the TRPS1 gene to 8q24. It maps centromeric to the gene that is mutant in multiple exostoses type I (EXT1; 133700); EXT1 is deleted in all patients with TRPS type II, or Langer-Giedion syndrome (150230), which combines features of TRPS I and multiple exostoses. Momeni et al. (2000) positionally cloned a gene that spanned the chromosomal breakpoint in 2 patients with TRPS I and was deleted in 5 patients with TRPS I associated with an interstitial deletion. Northern blot analyses revealed transcripts of 7 and 10.5 kb. The gene, designated TRPS1, has 7 exons and encodes a polypeptide of 1,281 amino acids. The predicted protein sequence has 2 potential nuclear localization signals and an unusual combination of different zinc finger motifs, including IKAROS-like (see 603023) and GATA-binding (see 600576) sequences. Momeni et al. (2000) identified 6 different nonsense mutations in 10 unrelated patients. The findings suggested that haploinsufficiency for this putative transcription factor causes TRPS I. To investigate whether trichorhinophalangeal syndrome type III (190351) is caused by TRPS1 mutations and to establish a genotype-phenotype correlation in TRPS, Ludecke et al. (2001) performed extensive mutation analysis and evaluated height and degree of brachydactyly in patients with TRPS I or TRPS III. They found 35 different mutations in 44 of 51 unrelated patients. The detection rate (86%) indicated that TRPS1 is the major locus for TRPS I and TRPS III. They found no mutation in the parents of sporadic patients or in apparently healthy relatives of familial patients, indicating complete penetrance of TRPS1 mutations. Evaluation of skeletal abnormalities of patients with TRPS1 mutations revealed a wide clinical spectrum. The phenotype was variable in unrelated, age- and sex-matched patients with identical mutations, as well as in families. Four of the 5 missense mutations altered the GATA DNA-binding zinc finger, and 6 of the 7 unrelated patients with these mutations could be classified as having TRPS III, because they had severe bradycardia, due to short metacarpals, and severe short stature. The data indicated that TRPS III is at the severe end of the TRPS spectrum and that it is most often caused by a specific class of mutations in exon 6 the TRPS1 gene. In the study of Ludecke et al. (2001), 5 mutations were recurrent, and 4 of these were identified in patients of different ethnicities: 1 in patients of Norwegian, Turkish, and Belgian extraction, and another in patients of Belgian, Turkish, and Japanese extraction, for example.

[0486] Full details of the abovementioned studies are described in the following publications, the disclosure of which are hereby incorporated by reference:
[0487] Momeni, P.; Glockner, G.; Schmidt, O.; von Holtum, D.; Albrecht, B.; Gillessen-Kaesbach, G.; Hennekam, R.; Meinecke, P.; Zabel, B.; Rosenthal, A.; Horsthemke, B.; Ludecke, H.-J.: Mutations in a new gene, encoding a zinc-finger protein, cause tricho-rhino-phalangeal syndrome type I. Nature Genet. 24: 71-74, 2000. PubMed ID: 10615131 Ludecke, H.-J.; Schaper, J.; Meinecke, P.; Momeni, P.; Gross, S.; von Holtum, D.; Hirche, H.; Abramowicz, M. J.; Albrecht, B.; Apacik, C.; Christen, H.-J.; Claussen, U.; and 28 others: Genotypic and phenotypic spectrum in tricho-rhino-phalangeal syndrome types I and III. Am. J. Hum. Genet. 68: 81-91, 2001.

[0488] Further studies establishing the function and utilities of TRPS1 are found in John Hopkins OMIM database record ID 604386, and in references numbered 65-71 listed hereinbelow.

[0489] Reference is now made to TRPS1 BINDING SITE. trichorhinophalangeal syndrome I (TRPS1) is a host target gene of VGAM18, corresponding to VGAM18-HOST-TARGET GENE of FIG. 18A. TRPS1 BINDING SITE is a host binding site found in the 3′ untranslated region of TRPS1, corresponding to HOST BINDING SITE of FIG. 18A. FIG. 18D illustrates the complementarity of the nucleotide sequence of TRPS1 BINDING SITE, designated SEQ ID:49, to the nucleotide sequence of VGAM18 RNA of FIG. 18A, designated SEQ ID:40.

[0490] A further function of VGAM18 is therefore inhibition of trichorhinophalangeal syndrome I (TRPS1), a host gene which encodes a transcripition factor that is associated with trichorhinophalangeal syndrome type I, type III, as part of a novel viral mechanism used by Equine herpesvirus 2 for attacking a host. Accordingly, utilities of VGAM18 include diagnosis, prevention and treatment of viral infection by Equine herpesvirus 2.

[0491] The function of TRPS1 has been established by previous studies. Trichorhinophalangeal syndrome type I (190350) is a malformation syndrome characterized by distinctive craniofacial and skeletal abnormalities and is inherited as an autosomal dominant. TRPS I patients have sparse scalp hair, bulbous tip of the nose, long flat philtrum, thin upper vermilion border, and protruding ears. Skeletal abnormalities include cone-shaped epiphyses at the phalanges, hip malformations, and short stature. Ludecke et al. (1995) and Hou et al. (1995) assigned the TRPS1 gene to 8q24. It maps centromeric to the gene that is mutant in multiple exostoses type I (EXT1; 133700); EXT1 is deleted in all patients with TRPS type II, or Langer-Giedion syndrome (150230), which combines features of TRPS I and multiple exostoses. Momeni et al. (2000) positionally cloned a gene that spanned the chromosomal breakpoint in 2 patients with TRPS I and was deleted in 5 patients with TRPS I associated with an interstitial deletion. Northern blot analyses revealed transcripts of 7 and 10.5 kb. The gene, designated TRPS1, has 7 exons and encodes a polypeptide of 1,281 amino acids. The predicted protein sequence has 2 potential nuclear localization signals and an unusual combination of different zinc finger motifs, including IKAROS-like (see 603023) and GATA-binding (see 600576) sequences. Momeni et al. (2000) identified 6 different nonsense mutations in 10 unrelated patients. The findings suggested that haploinsufficiency for this putative transcription factor causes TRPS I. To investigate whether trichorhinophalangeal syndrome type III (190351) is caused by TRPS1 mutations and to establish a genotype-phenotype correlation in TRPS, Ludecke et al. (2001) performed extensive mutation analysis and evaluated height and degree of brachydactyly in patients with TRPS I or TRPS III. They found 35 different mutations in 44 of 51 unrelated patients. The detection rate (86%) indicated that TRPS1 is the major locus for TRPS I and TRPS III. They found no mutation in the parents of sporadic patients or in apparently healthy relatives of familial patients, indicating complete penetrance of TRPS1 mutations. Evaluation of skeletal abnormalities of patients with TRPS1 mutations revealed a wide clinical spectrum. The phenotype was variable in unrelated, age- and sex-matched patients with identical mutations, as well as in families. Four of the 5 missense mutations altered the GATA DNA-binding zinc finger, and 6 of the 7 unrelated patients with these mutations could be classified as having TRPS III, because they had severe bradycardia, due to short metacarpals, and severe short stature. The data indicated that TRPS III is at the severe end of the TRPS spectrum and that it is most often caused by a specific class of mutations in exon 6 the TRPS1 gene. In the study of Ludecke et al. (2001), 5 mutations were recurrent, and 4 of these were identified in patients of different ethnicities: 1 in patients of Norwegian, Turkish, and Belgian extraction, and another in patients of Belgian, Turkish, and Japanese extraction, for example.

[0492] Full details of the abovementioned studies are described in the following publications, the disclosure of which are hereby incorporated by reference:
[0493] Momeni, P.; Glockner, G.; Schmidt, O.; von Holtum, D.; Albrecht, B.; Gillessen-Kaesbach, G.; Hennekam, R.; Meinecke, P.; Zabel, B.; Rosenthal, A.; Horsthemke, B.; Ludecke, H.-J.: Mutations in a new gene, encoding a zinc-finger protein, cause tricho-rhino-phalangeal syndrome type I. Nature Genet. 24: 71-74, 2000. PubMed ID: 10615131 Ludecke, H.-J.; Schaper, J.; Meinecke, P.; Momeni, P.; Gross, S.; von Holtum, D.; Hirche, H.; Abramowicz, M. J.; Albrecht, B.; Apacik, C.; Christen, H.-J.; Claussen, U.; and 28 others: Genotypic and phenotypic spectrum in tricho-rhino-phalangeal syndrome types I and III. Am. J. Hum. Genet. 68: 81-91, 2001.

[0494] Further studies establishing the function and utilities of TRPS1 are found in John Hopkins OMIM database record ID 604386, and in references numbered 65-71 listed hereinbelow.

[0495] Reference is now made to TRPS1 BINDING SITE. trichorhinophalangeal syndrome I (TRPS1) is a host target gene of VGAM18, corresponding to VGAM18-HOST-TARGET GENE of FIG. 18A. TRPS1 BINDING SITE is a host binding site found in the 3′ untranslated region of TRPS1, corresponding to HOST BINDING SITE of FIG. 18A. FIG. 18D illustrates the complementarity of the nucleotide sequence of TRPS1 BINDING SITE, designated SEQ ID:49, to the nucleotide sequence of VGAM18 RNA of FIG. 18A, designated SEQ ID:40.

[0496] A further function of VGAM18 is therefore inhibition of trichorhinophalangeal syndrome I (TRPS1), a host gene which encodes a transcripition factor that is associated with trichorhinophalangeal syndrome type I, type III, as part of a novel viral mechanism used by Equine herpesvirus 2 for attacking a host. Accordingly, utilities of VGAM18 include diagnosis, prevention and treatment of viral infection by Equine herpesvirus 2.

[0497] The function of TRPS1 has been established by previous studies. Trichorhinophalangeal syndrome type I (190350) is a malformation syndrome characterized by distinctive craniofacial and skeletal abnormalities and is inherited as an autosomal dominant. TRPS I patients have sparse scalp hair, bulbous tip of the nose, long flat philtrum, thin upper vermilion border, and protruding ears. Skeletal abnormalities include cone-shaped epiphyses at the phalanges, hip malformations, and short stature. Ludecke et al. (1995) and Hou et al. (1995) assigned the TRPS1 gene to 8q24. It maps centromeric to the gene that is mutant in multiple exostoses type I (EXT1; 133700); EXT1 is deleted in all patients with TRPS type II, or Langer-Giedion syndrome (150230), which combines features of TRPS I and multiple exostoses. Momeni et al. (2000) positionally cloned a gene that spanned the chromosomal breakpoint in 2 patients with TRPS I and was deleted in 5 patients with TRPS I associated with an interstitial deletion. Northern blot analyses revealed transcripts of 7 and 10.5 kb. The gene, designated TRPS1, has 7 exons and encodes a polypeptide of 1,281 amino acids. The predicted protein sequence has 2 potential nuclear localization signals and an unusual combination of different zinc finger motifs, including IKAROS-like (see 603023) and GATA-binding (see 600576) sequences. Momeni et al. (2000) identified 6 different nonsense mutations in 10 unrelated patients. The findings suggested that haploinsufficiency for this putative transcription factor causes TRPS I. To investigate whether trichorhinophalangeal syndrome type III (190351) is caused by TRPS1 mutations and to establish a genotype-phenotype correlation in TRPS, Ludecke et al. (2001) performed extensive mutation analysis and evaluated height and degree of brachydactyly in patients with TRPS I or TRPS III. They found 35 different mutations in 44 of 51 unrelated patients. The detection rate (86%) indicated that TRPS1 is the major locus for TRPS I and TRPS III. They found no mutation in the parents of sporadic patients or in apparently healthy relatives of familial patients, indicating complete penetrance of TRPS1 mutations. Evaluation of skeletal abnormalities of patients with TRPS1 mutations revealed a wide clinical spectrum. The phenotype was variable in unrelated, age- and sex-matched patients with identical mutations, as well as in families. Four of the 5 missense mutations altered the GATA DNA-binding zinc finger, and 6 of the 7 unrelated patients with these mutations could be classified as having TRPS III, because they had severe bradycardia, due to short metacarpals, and severe short stature. The data indicated that TRPS III is at the severe end of the TRPS spectrum and that it is most often caused by a specific class of mutations in exon 6 the TRPS1 gene. In the study of Ludecke et al. (2001), 5 mutations were recurrent, and 4 of these were identified in patients of different ethnicities: 1 in patients of Norwegian, Turkish, and Belgian extraction, and another in patients of Belgian, Turkish, and Japanese extraction, for example.

[0498] Full details of the abovementioned studies are described in the following publications, the disclosure of which are hereby incorporated by reference:
[0499] Momeni, P.; Glockner, G.; Schmidt, O.; von Holtum, D.; Albrecht, B.; Gillessen-Kaesbach, G.; Hennekam, R.; Meinecke, P.; Zabel, B.; Rosenthal, A.; Horsthemke, B.; Ludecke, H.-J.: Mutations in a new gene, encoding a zinc-finger protein, cause tricho-rhino-phalangeal syndrome type I. Nature Genet. 24: 71-74, 2000. PubMed ID: 10615131 Ludecke, H.-J.; Schaper, J.; Meinecke, P.; Momeni, P.; Gross, S.; von Holtum, D.; Hirche, H.; Abramowicz, M. J.; Albrecht, B.; Apacik, C.; Christen, H.-J.; Claussen, U.; and 28 others: Genotypic and phenotypic spectrum in tricho-rhino-phalangeal syndrome types I and III. Am. J. Hum. Genet. 68: 81-91, 2001.

[0500] Further studies establishing the function and utilities of TRPS1 are found in John Hopkins OMIM database record ID 604386, and in references numbered 65-71 listed hereinbelow.

[0501] Reference is now made to TRPS1 BINDING SITE. trichorhinophalangeal syndrome I (TRPS1) is a host target gene of VGAM18, corresponding to VGAM18-HOST-TARGET GENE of FIG. 18A. TRPS1 BINDING SITE is a host binding site found in the 3′ untranslated region of TRPS1, corresponding to HOST BINDING SITE of FIG. 18A. FIG. 18D illustrates the complementarity of the nucleotide sequence of TRPS1 BINDING SITE, designated SEQ ID:49, to the nucleotide sequence of VGAM18 RNA of FIG. 18A, designated SEQ ID:40.

[0502] A further function of VGAM18 is therefore inhibition of trichorhinophalangeal syndrome I (TRPS1), a host gene which encodes a transcripition factor that is associated with trichorhinophalangeal syndrome type I, type III, as part of a novel viral mechanism used by Equine herpesvirus 2 for attacking a host. Accordingly, utilities of VGAM18 include diagnosis, prevention and treatment of viral infection by Equine herpesvirus 2.

[0503] The function of TRPS1 has been established by previous studies. Trichorhinophalangeal syndrome type I (190350) is a malformation syndrome characterized by distinctive craniofacial and skeletal abnormalities and is inherited as an autosomal dominant. TRPS I patients have sparse scalp hair, bulbous tip of the nose, long flat philtrum, thin upper vermilion border, and protruding ears. Skeletal abnormalities include cone-shaped epiphyses at the phalanges, hip malformations, and short stature. Ludecke et al. (1995) and Hou et al. (1995) assigned the TRPS1 gene to 8q24. It maps centromeric to the gene that is mutant in multiple exostoses type I (EXT1; 133700); EXT1 is deleted in all patients with TRPS type II, or Langer-Giedion syndrome (150230), which combines features of TRPS I and multiple exostoses. Momeni et al. (2000) positionally cloned a gene that spanned the chromosomal breakpoint in 2 patients with TRPS I and was deleted in 5 patients with TRPS I associated with an interstitial deletion. Northern blot analyses revealed transcripts of 7 and 10.5 kb. The gene, designated TRPS1, has 7 exons and encodes a polypeptide of 1,281 amino acids. The predicted protein sequence has 2 potential nuclear localization signals and an unusual combination of different zinc finger motifs, including IKAROS-like (see 603023) and GATA-binding (see 600576) sequences. Momeni et al. (2000) identified 6 different nonsense mutations in 10 unrelated patients. The findings suggested that haploinsufficiency for this putative transcription factor causes TRPS I. To investigate whether trichorhinophalangeal syndrome type III (190351) is caused by TRPS1 mutations and to establish a genotype-phenotype correlation in TRPS, Ludecke et al. (2001) performed extensive mutation analysis and evaluated height and degree of brachydactyly in patients with TRPS I or TRPS III. They found 35 different mutations in 44 of 51 unrelated patients. The detection rate (86%) indicated that TRPS1 is the major locus for TRPS I and TRPS III. They found no mutation in the parents of sporadic patients or in apparently healthy relatives of familial patients, indicating complete penetrance of TRPS1 mutations. Evaluation of skeletal abnormalities of patients with TRPS1 mutations revealed a wide clinical spectrum. The phenotype was variable in unrelated, age- and sex-matched patients with identical mutations, as well as in families. Four of the 5 missense mutations altered the GATA DNA-binding zinc finger, and 6 of the 7 unrelated patients with these mutations could be classified as having TRPS III, because they had severe bradycardia, due to short metacarpals, and severe short stature. The data indicated that TRPS III is at the severe end of the TRPS spectrum and that it is most often caused by a specific class of mutations in exon 6 the TRPS1 gene. In the study of Ludecke et al. (2001), 5 mutations were recurrent, and 4 of these were identified in patients of different ethnicities: 1 in patients of Norwegian, Turkish, and Belgian extraction, and another in patients of Belgian, Turkish, and Japanese extraction, for example.

[0504] Full details of the abovementioned studies are described in the following publications, the disclosure of which are hereby incorporated by reference:
[0505] Momeni, P.; Glockner, G.; Schmidt, O.; von Holtum, D.; Albrecht, B.; Gillessen-Kaesbach, G.; Hennekam, R.; Meinecke, P.; Zabel, B.; Rosenthal, A.; Horsthemke, B.; Ludecke, H.-J.: Mutations in a new gene, encoding a zinc-finger protein, cause tricho-rhino-phalangeal syndrome type I. Nature Genet. 24: 71-74, 2000. PubMed ID: 10615131 Ludecke, H.-J.; Schaper, J.; Meinecke, P.; Momeni, P.; Gross, S.; von Holtum, D.; Hirche, H.; Abramowicz, M. J.; Albrecht, B.; Apacik, C.; Christen, H.-J.; Claussen, U.; and 28 others: Genotypic and phenotypic spectrum in tricho-rhino-phalangeal syndrome types I and III. Am. J. Hum. Genet. 68: 81-91, 2001.

[0506] Further studies establishing the function and utilities of TRPS1 are found in John Hopkins OMIM database record ID 604386, and in references numbered 65-71 listed hereinbelow.

[0507] Reference is now made to TRPS1 BINDING SITE. trichorhinophalangeal syndrome I (TRPS1) is a host target gene of VGAM18, corresponding to VGAM18-HOST-TARGET GENE of FIG. 18A. TRPS1 BINDING SITE is a host binding site found in the 3′ untranslated region of TRPS1, corresponding to HOST BINDING SITE of FIG. 18A. FIG. 18D illustrates the complementarity of the nucleotide sequence of TRPS1 BINDING SITE, designated SEQ ID:49, to the nucleotide sequence of VGAM18 RNA of FIG. 18A, designated SEQ ID:40.

[0508] A further function of VGAM18 is therefore inhibition of trichorhinophalangeal syndrome I (TRPS1), a host gene which encodes a transcripition factor that is associated with trichorhinophalangeal syndrome type I, type III, as part of a novel viral mechanism used by Equine herpesvirus 2 for attacking a host. Accordingly, utilities of VGAM18 include diagnosis, prevention and treatment of viral infection by Equine herpesvirus 2.

[0509] The function of TRPS1 has been established by previous studies. Trichorhinophalangeal syndrome type I (190350) is a malformation syndrome characterized by distinctive craniofacial and skeletal abnormalities and is inherited as an autosomal dominant. TRPS I patients have sparse scalp hair, bulbous tip of the nose, long flat philtrum, thin upper vermilion border, and protruding ears. Skeletal abnormalities include cone-shaped epiphyses at the phalanges, hip malformations, and short stature. Ludecke et al. (1995) and Hou et al. (1995) assigned the TRPS1 gene to 8q24. It maps centromeric to the gene that is mutant in multiple exostoses type I (EXT1; 133700); EXT1 is deleted in all patients with TRPS type II, or Langer-Giedion syndrome (150230), which combines features of TRPS I and multiple exostoses. Momeni et al. (2000) positionally cloned a gene that spanned the chromosomal breakpoint in 2 patients with TRPS I and was deleted in 5 patients with TRPS I associated with an interstitial deletion. Northern blot analyses revealed transcripts of 7 and 10.5 kb. The gene, designated TRPS1, has 7 exons and encodes a polypeptide of 1,281 amino acids. The predicted protein sequence has 2 potential nuclear localization signals and an unusual combination of different zinc finger motifs, including IKAROS-like (see 603023) and GATA-binding (see 600576) sequences. Momeni et al. (2000) identified 6 different nonsense mutations in 10 unrelated patients. The findings suggested that haploinsufficiency for this putative transcription factor causes TRPS I. To investigate whether trichorhinophalangeal syndrome type III (190351) is caused by TRPS1 mutations and to establish a genotype-phenotype correlation in TRPS, Ludecke et al. (2001) performed extensive mutation analysis and evaluated height and degree of brachydactyly in patients with TRPS I or TRPS III. They found 35 different mutations in 44 of 51 unrelated patients. The detection rate (86%) indicated that TRPS1 is the major locus for TRPS I and TRPS III. They found no mutation in the parents of sporadic patients or in apparently healthy relatives of familial patients, indicating complete penetrance of TRPS1 mutations. Evaluation of skeletal abnormalities of patients with TRPS1 mutations revealed a wide clinical spectrum. The phenotype was variable in unrelated, age- and sex-matched patients with identical mutations, as well as in families. Four of the 5 missense mutations altered the GATA DNA-binding zinc finger, and 6 of the 7 unrelated patients with these mutations could be classified as having TRPS III, because they had severe bradycardia, due to short metacarpals, and severe short stature. The data indicated that TRPS III is at the severe end of the TRPS spectrum and that it is most often caused by a specific class of mutations in exon 6 the TRPS1 gene. In the study of Ludecke et al. (2001), 5 mutations were recurrent, and 4 of these were identified in patients of different ethnicities: 1 in patients of Norwegian, Turkish, and Belgian extraction, and another in patients of Belgian, Turkish, and Japanese extraction, for example.

[0510] Full details of the abovementioned studies are described in the following publications, the disclosure of which are hereby incorporated by reference:
[0511] Momeni, P.; Glockner, G.; Schmidt, O.; von Holtum, D.; Albrecht, B.; Gillessen-Kaesbach, G.; Hennekam, R.; Meinecke, P.; Zabel, B.; Rosenthal, A.; Horsthemke, B.; Ludecke, H.-J.: Mutations in a new gene, encoding a zinc-finger protein, cause tricho-rhino-phalangeal syndrome type I. Nature Genet. 24: 71-74, 2000. PubMed ID: 10615131 Ludecke, H.-J.; Schaper, J.; Meinecke, P.; Momeni, P.; Gross, S.; von Holtum, D.; Hirche, H.; Abramowicz, M. J.; Albrecht, B.; Apacik, C.; Christen, H.-J.; Claussen, U.; and 28 others: Genotypic and phenotypic spectrum in tricho-rhino-phalangeal syndrome types I and III. Am. J. Hum. Genet. 68: 81-91, 2001.

[0512] Further studies establishing the function and utilities of TRPS1 are found in John Hopkins OMIM database record ID 604386, and in references numbered 65-71 listed hereinbelow.

[0513] Reference is now made to TRPS1 BINDING SITE. trichorhinophalangeal syndrome I (TRPS1) is a host target gene of VGAM18, corresponding to VGAM18-HOST-TARGET GENE of FIG. 18A. TRPS1 BINDING SITE is a host binding site found in the 3′ untranslated region of TRPS1, corresponding to HOST BINDING SITE of FIG. 18A. FIG. 18D illustrates the complementarity of the nucleotide sequence of TRPS1 BINDING SITE, designated SEQ ID:49, to the nucleotide sequence of VGAM18 RNA of FIG. 18A, designated SEQ ID:40.

[0514] A further function of VGAM18 is therefore inhibition of trichorhinophalangeal syndrome I (TRPS1), a host gene which encodes a transcripition factor that is associated with trichorhinophalangeal syndrome type I, type III, as part of a novel viral mechanism used by Equine herpesvirus 2 for attacking a host. Accordingly, utilities of VGAM18 include diagnosis, prevention and treatment of viral infection by Equine herpesvirus 2.

[0515] The function of TRPS1 has been established by previous studies. Trichorhinophalangeal syndrome type I (190350) is a malformation syndrome characterized by distinctive craniofacial and skeletal abnormalities and is inherited as an autosomal dominant. TRPS I patients have sparse scalp hair, bulbous tip of the nose, long flat philtrum, thin upper vermilion border, and protruding ears. Skeletal abnormalities include cone-shaped epiphyses at the phalanges, hip malformations, and short stature. Ludecke et al. (1995) and Hou et al. (1995) assigned the TRPS1 gene to 8q24. It maps centromeric to the gene that is mutant in multiple exostoses type I (EXT1; 133700); EXT1 is deleted in all patients with TRPS type II, or Langer-Giedion syndrome (150230), which combines features of TRPS I and multiple exostoses. Momeni et al. (2000) positionally cloned a gene that spanned the chromosomal breakpoint in 2 patients with TRPS I and was deleted in 5 patients with TRPS I associated with an interstitial deletion. Northern blot analyses revealed transcripts of 7 and 10.5 kb. The gene, designated TRPS1, has 7 exons and encodes a polypeptide of 1,281 amino acids. The predicted protein sequence has 2 potential nuclear localization signals and an unusual combination of different zinc finger motifs, including IKAROS-like (see 603023) and GATA-binding (see 600576) sequences. Momeni et al. (2000) identified 6 different nonsense mutations in 10 unrelated patients. The findings suggested that haploinsufficiency for this putative transcription factor causes TRPS I. To investigate whether trichorhinophalangeal syndrome type III (190351) is caused by TRPS1 mutations and to establish a genotype-phenotype correlation in TRPS, Ludecke et al. (2001) performed extensive mutation analysis and evaluated height and degree of brachydactyly in patients with TRPS I or TRPS III. They found 35 different mutations in 44 of 51 unrelated patients. The detection rate (86%) indicated that TRPS1 is the major locus for TRPS I and TRPS III. They found no mutation in the parents of sporadic patients or in apparently healthy relatives of familial patients, indicating complete penetrance of TRPS1 mutations. Evaluation of skeletal abnormalities of patients with TRPS1 mutations revealed a wide clinical spectrum. The phenotype was variable in unrelated, age- and sex-matched patients with identical mutations, as well as in families. Four of the 5 missense mutations altered the GATA DNA-binding zinc finger, and 6 of the 7 unrelated patients with these mutations could be classified as having TRPS III, because they had severe bradycardia, due to short metacarpals, and severe short stature. The data indicated that TRPS III is at the severe end of the TRPS spectrum and that it is most often caused by a specific class of mutations in exon 6 the TRPS1 gene. In the study of Ludecke et al. (2001), 5 mutations were recurrent, and 4 of these were identified in patients of different ethnicities: 1 in patients of Norwegian, Turkish, and Belgian extraction, and another in patients of Belgian, Turkish, and Japanese extraction, for example.

[0516] Full details of the abovementioned studies are described in the following publications, the disclosure of which are hereby incorporated by reference:
[0517] Momeni, P.; Glockner, G.; Schmidt, O.; von Holtum, D.; Albrecht, B.; Gillessen-Kaesbach, G.; Hennekam, R.; Meinecke, P.; Zabel, B.; Rosenthal, A.; Horsthemke, B.; Ludecke, H.-J.: Mutations in a new gene, encoding a zinc-finger protein, cause tricho-rhino-phalangeal syndrome type I. Nature Genet. 24: 71-74, 2000. PubMed ID: 10615131 Ludecke, H.-J.; Schaper, J.; Meinecke, P.; Momeni, P.; Gross, S.; von Holtum, D.; Hirche, H.; Abramowicz, M. J.; Albrecht, B.; Apacik, C.; Christen, H.-J.; Claussen, U.; and 28 others: Genotypic and phenotypic spectrum in tricho-rhino-phalangeal syndrome types I and III. Am. J. Hum. Genet. 68: 81-91, 2001.

[0518] Further studies establishing the function and utilities of TRPS1 are found in John Hopkins OMIM database record ID 604386, and in references numbered 65-71 listed hereinbelow.

[0519] Reference is now made to TRPS1 BINDING SITE. trichorhinophalangeal syndrome I (TRPS1) is a host target gene of VGAM18, corresponding to VGAM18-HOST-TARGET GENE of FIG. 18A. TRPS1 BINDING SITE is a host binding site found in the 3′ untranslated region of TRPS1, corresponding to HOST BINDING SITE of FIG. 18A. FIG. 18D illustrates the complementarity of the nucleotide sequence of TRPS1 BINDING SITE, designated SEQ ID:49, to the nucleotide sequence of VGAM18 RNA of FIG. 18A, designated SEQ ID:40.

[0520] A further function of VGAM18 is therefore inhibition of trichorhinophalangeal syndrome I (TRPS1), a host gene which encodes a transcripition factor that is associated with trichorhinophalangeal syndrome type I, type III, as part of a novel viral mechanism used by Equine herpesvirus 2 for attacking a host. Accordingly, utilities of VGAM18 include diagnosis, prevention and treatment of viral infection by Equine herpesvirus 2.

[0521] The function of TRPS1 has been established by previous studies. Trichorhinophalangeal syndrome type I (190350) is a malformation syndrome characterized by distinctive craniofacial and skeletal abnormalities and is inherited as an autosomal dominant. TRPS I patients have sparse scalp hair, bulbous tip of the nose, long flat philtrum, thin upper vermilion border, and protruding ears. Skeletal abnormalities include cone-shaped epiphyses at the phalanges, hip malformations, and short stature. Ludecke et al. (1995) and Hou et al. (1995) assigned the TRPS1 gene to 8q24. It maps centromeric to the gene that is mutant in multiple exostoses type I (EXT1; 133700); EXT1 is deleted in all patients with TRPS type II, or Langer-Giedion syndrome (150230), which combines features of TRPS I and multiple exostoses. Momeni et al. (2000) positionally cloned a gene that spanned the chromosomal breakpoint in 2 patients with TRPS I and was deleted in 5 patients with TRPS I associated with an interstitial deletion. Northern blot analyses revealed transcripts of 7 and 10.5 kb. The gene, designated TRPS1, has 7 exons and encodes a polypeptide of 1,281 amino acids. The predicted protein sequence has 2 potential nuclear localization signals and an unusual combination of different zinc finger motifs, including IKAROS-like (see 603023) and GATA-binding (see 600576) sequences. Momeni et al. (2000) identified 6 different nonsense mutations in 10 unrelated patients. The findings suggested that haploinsufficiency for this putative transcription factor causes TRPS I. To investigate whether trichorhinophalangeal syndrome type III (190351) is caused by TRPS1 mutations and to establish a genotype-phenotype correlation in TRPS, Ludecke et al. (2001) performed extensive mutation analysis and evaluated height and degree of brachydactyly in patients with TRPS I or TRPS III. They found 35 different mutations in 44 of 51 unrelated patients. The detection rate (86%) indicated that TRPS1 is the major locus for TRPS I and TRPS III. They found no mutation in the parents of sporadic patients or in apparently healthy relatives of familial patients, indicating complete penetrance of TRPS1 mutations. Evaluation of skeletal abnormalities of patients with TRPS1 mutations revealed a wide clinical spectrum. The phenotype was variable in unrelated, age- and sex-matched patients with identical mutations, as well as in families. Four of the 5 missense mutations altered the GATA DNA-binding zinc finger, and 6 of the 7 unrelated patients with these mutations could be classified as having TRPS III, because they had severe bradycardia, due to short metacarpals, and severe short stature. The data indicated that TRPS III is at the severe end of the TRPS spectrum and that it is most often caused by a specific class of mutations in exon 6 the TRPS1 gene. In the study of Ludecke et al. (2001), 5 mutations were recurrent, and 4 of these were identified in patients of different ethnicities: 1 in patients of Norwegian, Turkish, and Belgian extraction, and another in patients of Belgian, Turkish, and Japanese extraction, for example.

[0522] Full details of the abovementioned studies are described in the following publications, the disclosure of which are hereby incorporated by reference:
[0523] Momeni, P.; Glockner, G.; Schmidt, O.; von Holtum, D.; Albrecht, B.; Gillessen-Kaesbach, G.; Hennekam, R.; Meinecke, P.; Zabel, B.; Rosenthal, A.; Horsthemke, B.; Ludecke, H.-J.: Mutations in a new gene, encoding a zinc-finger protein, cause tricho-rhino-phalangeal syndrome type I. Nature Genet. 24: 71-74, 2000. PubMed ID: 10615131 Ludecke, H.-J.; Schaper, J.; Meinecke, P.; Momeni, P.; Gross, S.; von Holtum, D.; Hirche, H.; Abramowicz, M. J.; Albrecht, B.; Apacik, C.; Christen, H.-J.; Claussen, U.; and 28 others: Genotypic and phenotypic spectrum in tricho-rhino-phalangeal syndrome types I and III. Am. J. Hum. Genet. 68: 81-91, 2001.

[0524] Further studies establishing the function and utilities of TRPS1 are found in John Hopkins OMIM database record ID 604386, and in references numbered 65-71 listed hereinbelow.

[0525] Reference is now made to TRPS1 BINDING SITE. trichorhinophalangeal syndrome I (TRPS1) is a host target gene of VGAM18, corresponding to VGAM18-HOST-TARGET GENE of FIG. 18A. TRPS1 BINDING SITE is a host binding site found in the 3′ untranslated region of TRPS1, corresponding to HOST BINDING SITE of FIG. 18A. FIG. 18D illustrates the complementarity of the nucleotide sequence of TRPS1 BINDING SITE, designated SEQ ID:49, to the nucleotide sequence of VGAM18 RNA of FIG. 18A, designated SEQ ID:40.

[0526] A further function of VGAM18 is therefore inhibition of trichorhinophalangeal syndrome I (TRPS1), a host gene which encodes a transcripition factor that is associated with trichorhinophalangeal syndrome type I, type III, as part of a novel viral mechanism used by Equine herpesvirus 2 for attacking a host. Accordingly, utilities of VGAM18 include diagnosis, prevention and treatment of viral infection by Equine herpesvirus 2.

[0527] The function of TRPS1 has been established by previous studies. Trichorhinophalangeal syndrome type I (190350) is a malformation syndrome characterized by distinctive craniofacial and skeletal abnormalities and is inherited as an autosomal dominant. TRPS I patients have sparse scalp hair, bulbous tip of the nose, long flat philtrum, thin upper vermilion border, and protruding ears. Skeletal abnormalities include cone-shaped epiphyses at the phalanges, hip malformations, and short stature. Ludecke et al. (1995) and Hou et al. (1995) assigned the TRPS1 gene to 8q24. It maps centromeric to the gene that is mutant in multiple exostoses type I (EXT1; 133700); EXT1 is deleted in all patients with TRPS type II, or Langer-Giedion syndrome (150230), which combines features of TRPS I and multiple exostoses. Momeni et al. (2000) positionally cloned a gene that spanned the chromosomal breakpoint in 2 patients with TRPS I and was deleted in 5 patients with TRPS I associated with an interstitial deletion. Northern blot analyses revealed transcripts of 7 and 10.5 kb. The gene, designated TRPS1, has 7 exons and encodes a polypeptide of 1,281 amino acids. The predicted protein sequence has 2 potential nuclear localization signals and an unusual combination of different zinc finger motifs, including IKAROS-like (see 603023) and GATA-binding (see 600576) sequences. Momeni et al. (2000) identified 6 different nonsense mutations in 10 unrelated patients. The findings suggested that haploinsufficiency for this putative transcription factor causes TRPS I. To investigate whether trichorhinophalangeal syndrome type III (190351) is caused by TRPS1 mutations and to establish a genotype-phenotype correlation in TRPS, Ludecke et al. (2001) performed extensive mutation analysis and evaluated height and degree of brachydactyly in patients with TRPS I or TRPS III. They found 35 different mutations in 44 of 51 unrelated patients. The detection rate (86%) indicated that TRPS1 is the major locus for TRPS I and TRPS III. They found no mutation in the parents of sporadic patients or in apparently healthy relatives of familial patients, indicating complete penetrance of TRPS1 mutations. Evaluation of skeletal abnormalities of patients with TRPS1 mutations revealed a wide clinical spectrum. The phenotype was variable in unrelated, age- and sex-matched patients with identical mutations, as well as in families. Four of the 5 missense mutations altered the GATA DNA-binding zinc finger, and 6 of the 7 unrelated patients with these mutations could be classified as having TRPS III, because they had severe bradycardia, due to short metacarpals, and severe short stature. The data indicated that TRPS III is at the severe end of the TRPS spectrum and that it is most often caused by a specific class of mutations in exon 6 the TRPS1 gene. In the study of Ludecke et al. (2001), 5 mutations were recurrent, and 4 of these were identified in patients of different ethnicities: 1 in patients of Norwegian, Turkish, and Belgian extraction, and another in patients of Belgian, Turkish, and Japanese extraction, for example.

[0528] Full details of the abovementioned studies are described in the following publications, the disclosure of which are hereby incorporated by reference:
[0529] Momeni, P.; Glockner, G.; Schmidt, O.; von Holtum, D.; Albrecht, B.; Gillessen-Kaesbach, G.; Hennekam, R.; Meinecke, P.; Zabel, B.; Rosenthal, A.; Horsthemke, B.; Ludecke, H.-J.: Mutations in a new gene, encoding a zinc-finger protein, cause tricho-rhino-phalangeal syndrome type I. Nature Genet. 24: 71-74, 2000. PubMed ID: 10615131 Ludecke, H.-J.; Schaper, J.; Meinecke, P.; Momeni, P.; Gross, S.; von Holtum, D.; Hirche, H.; Abramowicz, M. J.; Albrecht, B.; Apacik, C.; Christen, H.-J.; Claussen, U.; and 28 others: Genotypic and phenotypic spectrum in tricho-rhino-phalangeal syndrome types I and III. Am. J. Hum. Genet. 68: 81-91, 2001.

[0530] Further studies establishing the function and utilities of TRPS1 are found in John Hopkins OMIM database record ID 604386, and in references numbered 65-71 listed hereinbelow.

[0531] Reference is now made to TRPS1 BINDING SITE. trichorhinophalangeal syndrome I (TRPS1) is a host target gene of VGAM18, corresponding to VGAM18-HOST-TARGET GENE of FIG. 18A. TRPS1 BINDING SITE is a host binding site found in the 3′ untranslated region of TRPS1, corresponding to HOST BINDING SITE of FIG. 18A. FIG. 18D illustrates the complementarity of the nucleotide sequence of TRPS1 BINDING SITE, designated SEQ ID:49, to the nucleotide sequence of VGAM18 RNA of FIG. 18A, designated SEQ ID:40.

[0532] A further function of VGAM18 is therefore inhibition of trichorhinophalangeal syndrome I (TRPS1), a host gene which encodes a transcripition factor that is associated with trichorhinophalangeal syndrome type I, type III, as part of a novel viral mechanism used by Equine herpesvirus 2 for attacking a host. Accordingly, utilities of VGAM18 include diagnosis, prevention and treatment of viral infection by Equine herpesvirus 2.

[0533] The function of TRPS1 has been established by previous studies. Trichorhinophalangeal syndrome type I (190350) is a malformation syndrome characterized by distinctive craniofacial and skeletal abnormalities and is inherited as an autosomal dominant. TRPS I patients have sparse scalp hair, bulbous tip of the nose, long flat philtrum, thin upper vermilion border, and protruding ears. Skeletal abnormalities include cone-shaped epiphyses at the phalanges, hip malformations, and short stature. Ludecke et al. (1995) and Hou et al. (1995) assigned the TRPS1 gene to 8q24. It maps centromeric to the gene that is mutant in multiple exostoses type I (EXT1; 133700); EXT1 is deleted in all patients with TRPS type II, or Langer-Giedion syndrome (150230), which combines features of TRPS I and multiple exostoses. Momeni et al. (2000) positionally cloned a gene that spanned the chromosomal breakpoint in 2 patients with TRPS I and was deleted in 5 patients with TRPS I associated with an interstitial deletion. Northern blot analyses revealed transcripts of 7 and 10.5 kb. The gene, designated TRPS1, has 7 exons and encodes a polypeptide of 1,281 amino acids. The predicted protein sequence has 2 potential nuclear localization signals and an unusual combination of different zinc finger motifs, including IKAROS-like (see 603023) and GATA-binding (see 600576) sequences. Momeni et al. (2000) identified 6 different nonsense mutations in 10 unrelated patients. The findings suggested that haploinsufficiency for this putative transcription factor causes TRPS I. To investigate whether trichorhinophalangeal syndrome type III (190351) is caused by TRPS1 mutations and to establish a genotype-phenotype correlation in TRPS, Ludecke et al. (2001) performed extensive mutation analysis and evaluated height and degree of brachydactyly in patients with TRPS I or TRPS III. They found 35 different mutations in 44 of 51 unrelated patients. The detection rate (86%) indicated that TRPS1 is the major locus for TRPS I and TRPS III. They found no mutation in the parents of sporadic patients or in apparently healthy relatives of familial patients, indicating complete penetrance of TRPS1 mutations. Evaluation of skeletal abnormalities of patients with TRPS1 mutations revealed a wide clinical spectrum. The phenotype was variable in unrelated, age- and sex-matched patients with identical mutations, as well as in families. Four of the 5 missense mutations altered the GATA DNA-binding zinc finger, and 6 of the 7 unrelated patients with these mutations could be classified as having TRPS III, because they had severe bradycardia, due to short metacarpals, and severe short stature. The data indicated that TRPS III is at the severe end of the TRPS spectrum and that it is most often caused by a specific class of mutations in exon 6 the TRPS1 gene. In the study of Ludecke et al. (2001), 5 mutations were recurrent, and 4 of these were identified in patients of different ethnicities: 1 in patients of Norwegian, Turkish, and Belgian extraction, and another in patients of Belgian, Turkish, and Japanese extraction, for example.

[0534] Full details of the abovementioned studies are described in the following publications, the disclosure of which are hereby incorporated by reference:
[0535] Momeni, P.; Glockner, G.; Schmidt, O.; von Holtum, D.; Albrecht, B.; Gillessen-Kaesbach, G.; Hennekam, R.; Meinecke, P.; Zabel, B.; Rosenthal, A.; Horsthemke, B.; Ludecke, H.-J.: Mutations in a new gene, encoding a zinc-finger protein, cause tricho-rhino-phalangeal syndrome type I. Nature Genet. 24: 71-74, 2000. PubMed ID: 10615131 Ludecke, H.-J.; Schaper, J.; Meinecke, P.; Momeni, P.; Gross, S.; von Holtum, D.; Hirche, H.; Abramowicz, M. J.; Albrecht, B.; Apacik, C.; Christen, H.-J.; Claussen, U.; and 28 others: Genotypic and phenotypic spectrum in tricho-rhino-phalangeal syndrome types I and III. Am. J. Hum. Genet. 68: 81-91, 2001.

[0536] Further studies establishing the function and utilities of TRPS1 are found in John Hopkins OMIM database record ID 604386, and in references numbered 65-71 listed hereinbelow.

[0537] Reference is now made to TRPS1 BINDING SITE. trichorhinophalangeal syndrome I (TRPS1) is a host target gene of VGAM18, corresponding to VGAM18-HOST-TARGET GENE of FIG. 18A. TRPS1 BINDING SITE is a host binding site found in the 3′ untranslated region of TRPS1, corresponding to HOST BINDING SITE of FIG. 18A. FIG. 18D illustrates the complementarity of the nucleotide sequence of TRPS1 BINDING SITE, designated SEQ ID:49, to the nucleotide sequence of VGAM18 RNA of FIG. 18A, designated SEQ ID:40.

[0538] A further function of VGAM18 is therefore inhibition of trichorhinophalangeal syndrome I (TRPS1), a host gene which encodes a transcripition factor that is associated with trichorhinophalangeal syndrome type I, type III, as part of a novel viral mechanism used by Equine herpesvirus 2 for attacking a host. Accordingly, utilities of VGAM18 include diagnosis, prevention and treatment of viral infection by Equine herpesvirus 2.

[0539] The function of TRPS1 has been established by previous studies. Trichorhinophalangeal syndrome type I (190350) is a malformation syndrome characterized by distinctive craniofacial and skeletal abnormalities and is inherited as an autosomal dominant. TRPS I patients have sparse scalp hair, bulbous tip of the nose, long flat philtrum, thin upper vermilion border, and protruding ears. Skeletal abnormalities include cone-shaped epiphyses at the phalanges, hip malformations, and short stature. Ludecke et al. (1995) and Hou et al. (1995) assigned the TRPS1 gene to 8q24. It maps centromeric to the gene that is mutant in multiple exostoses type I (EXT1; 133700); EXT1 is deleted in all patients with TRPS type II, or Langer-Giedion syndrome (150230), which combines features of TRPS I and multiple exostoses. Momeni et al. (2000) positionally cloned a gene that spanned the chromosomal breakpoint in 2 patients with TRPS I and was deleted in 5 patients with TRPS I associated with an interstitial deletion. Northern blot analyses revealed transcripts of 7 and 10.5 kb. The gene, designated TRPS1, has 7 exons and encodes a polypeptide of 1,281 amino acids. The predicted protein sequence has 2 potential nuclear localization signals and an unusual combination of different zinc finger motifs, including IKAROS-like (see 603023) and GATA-binding (see 600576) sequences. Momeni et al. (2000) identified 6 different nonsense mutations in 10 unrelated patients. The findings suggested that haploinsufficiency for this putative transcription factor causes TRPS I. To investigate whether trichorhinophalangeal syndrome type III (190351) is caused by TRPS1 mutations and to establish a genotype-phenotype correlation in TRPS, Ludecke et al. (2001) performed extensive mutation analysis and evaluated height and degree of brachydactyly in patients with TRPS I or TRPS III. They found 35 different mutations in 44 of 51 unrelated patients. The detection rate (86%) indicated that TRPS1 is the major locus for TRPS I and TRPS III. They found no mutation in the parents of sporadic patients or in apparently healthy relatives of familial patients, indicating complete penetrance of TRPS1 mutations. Evaluation of skeletal abnormalities of patients with TRPS1 mutations revealed a wide clinical spectrum. The phenotype was variable in unrelated, age- and sex-matched patients with identical mutations, as well as in families. Four of the 5 missense mutations altered the GATA DNA-binding zinc finger, and 6 of the 7 unrelated patients with these mutations could be classified as having TRPS III, because they had severe bradycardia, due to short metacarpals, and severe short stature. The data indicated that TRPS III is at the severe end of the TRPS spectrum and that it is most often caused by a specific class of mutations in exon 6 the TRPS1 gene. In the study of Ludecke et al. (2001), 5 mutations were recurrent, and 4 of these were identified in patients of different ethnicities: 1 in patients of Norwegian, Turkish, and Belgian extraction, and another in patients of Belgian, Turkish, and Japanese extraction, for example.

[0540] Full details of the abovementioned studies are described in the following publications, the disclosure of which are hereby incorporated by reference:
[0541] Momeni, P.; Glockner, G.; Schmidt, O.; von Holtum, D.; Albrecht, B.; Gillessen-Kaesbach, G.; Hennekam, R.; Meinecke, P.; Zabel, B.; Rosenthal, A.; Horsthemke, B.; Ludecke, H.-J.: Mutations in a new gene, encoding a zinc-finger protein, cause tricho-rhino-phalangeal syndrome type I. Nature Genet. 24: 71-74, 2000. PubMed ID: 10615131 Ludecke, H.-J.; Schaper, J.; Meinecke, P.; Momeni, P.; Gross, S.; von Holtum, D.; Hirche, H.; Abramowicz, M. J.; Albrecht, B.; Apacik, C.; Christen, H.-J.; Claussen, U.; and 28 others: Genotypic and phenotypic spectrum in tricho-rhino-phalangeal syndrome types I and III. Am. J. Hum. Genet. 68: 81-91, 2001.

[0542] Further studies establishing the function and utilities of TRPS1 are found in John Hopkins OMIM database record ID 604386, and in references numbered 65-71 listed hereinbelow.

[0543] Reference is now made to TRPS1 BINDING SITE. trichorhinophalangeal syndrome I (TRPS1) is a host target gene of VGAM18, corresponding to VGAM18-HOST-TARGET GENE of FIG. 18A. TRPS1 BINDING SITE is a host binding site found in the 3′ untranslated region of TRPS1, corresponding to HOST BINDING SITE of FIG. 18A. FIG. 18D illustrates the complementarity of the nucleotide sequence of TRPS1 BINDING SITE, designated SEQ ID:49, to the nucleotide sequence of VGAM18 RNA of FIG. 18A, designated SEQ ID:40.

[0544] A further function of VGAM18 is therefore inhibition of trichorhinophalangeal syndrome I (TRPS1), a host gene which encodes a transcripition factor that is associated with trichorhinophalangeal syndrome type I, type III, as part of a novel viral mechanism used by Equine herpesvirus 2 for attacking a host. Accordingly, utilities of VGAM18 include diagnosis, prevention and treatment of viral infection by Equine herpesvirus 2.

[0545] The function of TRPS1 has been established by previous studies. Trichorhinophalangeal syndrome type I (190350) is a malformation syndrome characterized by distinctive craniofacial and skeletal abnormalities and is inherited as an autosomal dominant. TRPS I patients have sparse scalp hair, bulbous tip of the nose, long flat philtrum, thin upper vermilion border, and protruding ears. Skeletal abnormalities include cone-shaped epiphyses at the phalanges, hip malformations, and short stature. Ludecke et al. (1995) and Hou et al. (1995) assigned the TRPS1 gene to 8q24. It maps centromeric to the gene that is mutant in multiple exostoses type I (EXT1; 133700); EXT1 is deleted in all patients with TRPS type II, or Langer-Giedion syndrome (150230), which combines features of TRPS I and multiple exostoses. Momeni et al. (2000) positionally cloned a gene that spanned the chromosomal breakpoint in 2 patients with TRPS I and was deleted in 5 patients with TRPS I associated with an interstitial deletion. Northern blot analyses revealed transcripts of 7 and 10.5 kb. The gene, designated TRPS1, has 7 exons and encodes a polypeptide of 1,281 amino acids. The predicted protein sequence has 2 potential nuclear localization signals and an unusual combination of different zinc finger motifs, including IKAROS-like (see 603023) and GATA-binding (see 600576) sequences. Momeni et al. (2000) identified 6 different nonsense mutations in 10 unrelated patients. The findings suggested that haploinsufficiency for this putative transcription factor causes TRPS I. To investigate whether trichorhinophalangeal syndrome type III (190351) is caused by TRPS1 mutations and to establish a genotype-phenotype correlation in TRPS, Ludecke et al. (2001) performed extensive mutation analysis and evaluated height and degree of brachydactyly in patients with TRPS I or TRPS III. They found 35 different mutations in 44 of 51 unrelated patients. The detection rate (86%) indicated that TRPS1 is the major locus for TRPS I and TRPS III. They found no mutation in the parents of sporadic patients or in apparently healthy relatives of familial patients, indicating complete penetrance of TRPS1 mutations. Evaluation of skeletal abnormalities of patients with TRPS1 mutations revealed a wide clinical spectrum. The phenotype was variable in unrelated, age- and sex-matched patients with identical mutations, as well as in families. Four of the 5 missense mutations altered the GATA DNA-binding zinc finger, and 6 of the 7 unrelated patients with these mutations could be classified as having TRPS III, because they had severe bradycardia, due to short metacarpals, and severe short stature. The data indicated that TRPS III is at the severe end of the TRPS spectrum and that it is most often caused by a specific class of mutations in exon 6 the TRPS1 gene. In the study of Ludecke et al. (2001), 5 mutations were recurrent, and 4 of these were identified in patients of different ethnicities: 1 in patients of Norwegian, Turkish, and Belgian extraction, and another in patients of Belgian, Turkish, and Japanese extraction, for example.

[0546] Full details of the abovementioned studies are described in the following publications, the disclosure of which are hereby incorporated by reference:
[0547] Momeni, P.; Glockner, G.; Schmidt, O.; von Holtum, D.; Albrecht, B.; Gillessen-Kaesbach, G.; Hennekam, R.; Meinecke, P.; Zabel, B.; Rosenthal, A.; Horsthemke, B.; Ludecke, H.-J.: Mutations in a new gene, encoding a zinc-finger protein, cause tricho-rhino-phalangeal syndrome type I. Nature Genet. 24: 71-74, 2000. PubMed ID: 10615131 Ludecke, H.-J.; Schaper, J.; Meinecke, P.; Momeni, P.; Gross, S.; von Holtum, D.; Hirche, H.; Abramowicz, M. J.; Albrecht, B.; Apacik, C.; Christen, H.-J.; Claussen, U.; and 28 others: Genotypic and phenotypic spectrum in tricho-rhino-phalangeal syndrome types I and III. Am. J. Hum. Genet. 68: 81-91, 2001.

[0548] Further studies establishing the function and utilities of TRPS1 are found in John Hopkins OMIM database record ID 604386, and in references numbered 65-71 listed hereinbelow.

[0549] Reference is now made to TRPS1 BINDING SITE. trichorhinophalangeal syndrome I (TRPS1) is a host target gene of VGAM18, corresponding to VGAM18-HOST-TARGET GENE of FIG. 18A. TRPS1 BINDING SITE is a host binding site found in the 3′ untranslated region of TRPS1, corresponding to HOST BINDING SITE of FIG. 18A. FIG. 18D illustrates the complementarity of the nucleotide sequence of TRPS1 BINDING SITE, designated SEQ ID:49, to the nucleotide sequence of VGAM18 RNA of FIG. 18A, designated SEQ ID:40.

[0550] A further function of VGAM18 is therefore inhibition of trichorhinophalangeal syndrome I (TRPS1), a host gene which encodes a transcripition factor that is associated with trichorhinophalangeal syndrome type I, type III, as part of a novel viral mechanism used by Equine herpesvirus 2 for attacking a host. Accordingly, utilities of VGAM18 include diagnosis, prevention and treatment of viral infection by Equine herpesvirus 2.

[0551] The function of TRPS1 has been established by previous studies. Trichorhinophalangeal syndrome type I (190350) is a malformation syndrome characterized by distinctive craniofacial and skeletal abnormalities and is inherited as an autosomal dominant. TRPS I patients have sparse scalp hair, bulbous tip of the nose, long flat philtrum, thin upper vermilion border, and protruding ears. Skeletal abnormalities include cone-shaped epiphyses at the phalanges, hip malformations, and short stature. Ludecke et al. (1995) and Hou et al. (1995) assigned the TRPS1 gene to 8q24. It maps centromeric to the gene that is mutant in multiple exostoses type I (EXT1; 133700); EXT1 is deleted in all patients with TRPS type II, or Langer-Giedion syndrome (150230), which combines features of TRPS I and multiple exostoses. Momeni et al. (2000) positionally cloned a gene that spanned the chromosomal breakpoint in 2 patients with TRPS I and was deleted in 5 patients with TRPS I associated with an interstitial deletion. Northern blot analyses revealed transcripts of 7 and 10.5 kb. The gene, designated TRPS1, has 7 exons and encodes a polypeptide of 1,281 amino acids. The predicted protein sequence has 2 potential nuclear localization signals and an unusual combination of different zinc finger motifs, including IKAROS-like (see 603023) and GATA-binding (see 600576) sequences. Momeni et al. (2000) identified 6 different nonsense mutations in 10 unrelated patients. The findings suggested that haploinsufficiency for this putative transcription factor causes TRPS I. To investigate whether trichorhinophalangeal syndrome type III (190351) is caused by TRPS1 mutations and to establish a genotype-phenotype correlation in TRPS, Ludecke et al. (2001) performed extensive mutation analysis and evaluated height and degree of brachydactyly in patients with TRPS I or TRPS III. They found 35 different mutations in 44 of 51 unrelated patients. The detection rate (86%) indicated that TRPS1 is the major locus for TRPS I and TRPS III. They found no mutation in the parents of sporadic patients or in apparently healthy relatives of familial patients, indicating complete penetrance of TRPS1 mutations. Evaluation of skeletal abnormalities of patients with TRPS1 mutations revealed a wide clinical spectrum. The phenotype was variable in unrelated, age- and sex-matched patients with identical mutations, as well as in families. Four of the 5 missense mutations altered the GATA DNA-binding zinc finger, and 6 of the 7 unrelated patients with these mutations could be classified as having TRPS III, because they had severe bradycardia, due to short metacarpals, and severe short stature. The data indicated that TRPS III is at the severe end of the TRPS spectrum and that it is most often caused by a specific class of mutations in exon 6 the TRPS1 gene. In the study of Ludecke et al. (2001), 5 mutations were recurrent, and 4 of these were identified in patients of different ethnicities: 1 in patients of Norwegian, Turkish, and Belgian extraction, and another in patients of Belgian, Turkish, and Japanese extraction, for example.

[0552] Full details of the abovementioned studies are described in the following publications, the disclosure of which are hereby incorporated by reference:
[0553] Momeni, P.; Glockner, G.; Schmidt, O.; von Holtum, D.; Albrecht, B.; Gillessen-Kaesbach, G.; Hennekam, R.; Meinecke, P.; Zabel, B.; Rosenthal, A.; Horsthemke, B.; Ludecke, H.-J.: Mutations in a new gene, encoding a zinc-finger protein, cause tricho-rhino-phalangeal syndrome type I. Nature Genet. 24: 71-74, 2000. PubMed ID: 10615131 Ludecke, H.-J.; Schaper, J.; Meinecke, P.; Momeni, P.; Gross, S.; von Holtum, D.; Hirche, H.; Abramowicz, M. J.; Albrecht, B.; Apacik, C.; Christen, H.-J.; Claussen, U.; and 28 others: Genotypic and phenotypic spectrum in tricho-rhino-phalangeal syndrome types I and III. Am. J. Hum. Genet. 68: 81-91, 2001.

[0554] Further studies establishing the function and utilities of TRPS1 are found in John Hopkins OMIM database record ID 604386, and in references numbered 65-71 listed hereinbelow.

[0555] Reference is now made to TRPS1 BINDING SITE. trichorhinophalangeal syndrome I (TRPS1) is a host target gene of VGAM18, corresponding to VGAM18-HOST-TARGET GENE of FIG. 18A. TRPS1 BINDING SITE is a host binding site found in the 3′ untranslated region of TRPS1, corresponding to HOST BINDING SITE of FIG. 18A. FIG. 18D illustrates the complementarity of the nucleotide sequence of TRPS1 BINDING SITE, designated SEQ ID:49, to the nucleotide sequence of VGAM18 RNA of FIG. 18A, designated SEQ ID:40.

[0556] A further function of VGAM18 is therefore inhibition of trichorhinophalangeal syndrome I (TRPS1), a host gene which encodes a transcripition factor that is associated with trichorhinophalangeal syndrome type I, type III, as part of a novel viral mechanism used by Equine herpesvirus 2 for attacking a host. Accordingly, utilities of VGAM18 include diagnosis, prevention and treatment of viral infection by Equine herpesvirus 2.

[0557] The function of TRPS1 has been established by previous studies. Trichorhinophalangeal syndrome type I (190350) is a malformation syndrome characterized by distinctive craniofacial and skeletal abnormalities and is inherited as an autosomal dominant. TRPS I patients have sparse scalp hair, bulbous tip of the nose, long flat philtrum, thin upper vermilion border, and protruding ears. Skeletal abnormalities include cone-shaped epiphyses at the phalanges, hip malformations, and short stature. Ludecke et al. (1995) and Hou et al. (1995) assigned the TRPS1 gene to 8q24. It maps centromeric to the gene that is mutant in multiple exostoses type I (EXT1; 133700); EXT1 is deleted in all patients with TRPS type II, or Langer-Giedion syndrome (150230), which combines features of TRPS I and multiple exostoses. Momeni et al. (2000) positionally cloned a gene that spanned the chromosomal breakpoint in 2 patients with TRPS I and was deleted in 5 patients with TRPS I associated with an interstitial deletion. Northern blot analyses revealed transcripts of 7 and 10.5 kb. The gene, designated TRPS1, has 7 exons and encodes a polypeptide of 1,281 amino acids. The predicted protein sequence has 2 potential nuclear localization signals and an unusual combination of different zinc finger motifs, including IKAROS-like (see 603023) and GATA-binding (see 600576) sequences. Momeni et al. (2000) identified 6 different nonsense mutations in 10 unrelated patients. The findings suggested that haploinsufficiency for this putative transcription factor causes TRPS I. To investigate whether trichorhinophalangeal syndrome type III (190351) is caused by TRPS1 mutations and to establish a genotype-phenotype correlation in TRPS, Ludecke et al. (2001) performed extensive mutation analysis and evaluated height and degree of brachydactyly in patients with TRPS I or TRPS III. They found 35 different mutations in 44 of 51 unrelated patients. The detection rate (86%) indicated that TRPS1 is the major locus for TRPS I and TRPS III. They found no mutation in the parents of sporadic patients or in apparently healthy relatives of familial patients, indicating complete penetrance of TRPS1 mutations. Evaluation of skeletal abnormalities of patients with TRPS1 mutations revealed a wide clinical spectrum. The phenotype was variable in unrelated, age- and sex-matched patients with identical mutations, as well as in families. Four of the 5 missense mutations altered the GATA DNA-binding zinc finger, and 6 of the 7 unrelated patients with these mutations could be classified as having TRPS III, because they had severe bradycardia, due to short metacarpals, and severe short stature. The data indicated that TRPS III is at the severe end of the TRPS spectrum and that it is most often caused by a specific class of mutations in exon 6 the TRPS1 gene. In the study of Ludecke et al. (2001), 5 mutations were recurrent, and 4 of these were identified in patients of different ethnicities: 1 in patients of Norwegian, Turkish, and Belgian extraction, and another in patients of Belgian, Turkish, and Japanese extraction, for example.

[0558] Full details of the abovementioned studies are described in the following publications, the disclosure of which are hereby incorporated by reference:
[0559] Momeni, P.; Glockner, G.; Schmidt, O.; von Holtum, D.; Albrecht, B.; Gillessen-Kaesbach, G.; Hennekam, R.; Meinecke, P.; Zabel, B.; Rosenthal, A.; Horsthemke, B.; Ludecke, H.-J.: Mutations in a new gene, encoding a zinc-finger protein, cause tricho-rhino-phalangeal syndrome type I. Nature Genet. 24: 71-74, 2000. PubMed ID: 10615131 Ludecke, H.-J.; Schaper, J.; Meinecke, P.; Momeni, P.; Gross, S.; von Holtum, D.; Hirche, H.; Abramowicz, M. J.; Albrecht, B.; Apacik, C.; Christen, H.-J.; Claussen, U.; and 28 others: Genotypic and phenotypic spectrum in tricho-rhino-phalangeal syndrome types I and III. Am. J. Hum. Genet. 68: 81-91, 2001.

[0560] Further studies establishing the function and utilities of TRPS1 are found in John Hopkins OMIM database record ID 604386, and in references numbered 65-71 listed hereinbelow.

[0561] Reference is now made to TRPS1 BINDING SITE. trichorhinophalangeal syndrome I (TRPS1) is a host target gene of VGAM18, corresponding to VGAM18-HOST-TARGET GENE of FIG. 18A. TRPS1 BINDING SITE is a host binding site found in the 3′ untranslated region of TRPS1, corresponding to HOST BINDING SITE of FIG. 18A. FIG. 18D illustrates the complementarity of the nucleotide sequence of TRPS1 BINDING SITE, designated SEQ ID:49, to the nucleotide sequence of VGAM18 RNA of FIG. 18A, designated SEQ ID:40.

[0562] A further function of VGAM18 is therefore inhibition of trichorhinophalangeal syndrome I (TRPS1), a host gene which encodes a transcripition factor that is associated with trichorhinophalangeal syndrome type I, type III, as part of a novel viral mechanism used by Equine herpesvirus 2 for attacking a host. Accordingly, utilities of VGAM18 include diagnosis, prevention and treatment of viral infection by Equine herpesvirus 2.

[0563] The function of TRPS1 has been established by previous studies. Trichorhinophalangeal syndrome type I (190350) is a malformation syndrome characterized by distinctive craniofacial and skeletal abnormalities and is inherited as an autosomal dominant. TRPS I patients have sparse scalp hair, bulbous tip of the nose, long flat philtrum, thin upper vermilion border, and protruding ears. Skeletal abnormalities include cone-shaped epiphyses at the phalanges, hip malformations, and short stature. Ludecke et al. (1995) and Hou et al. (1995) assigned the TRPS1 gene to 8q24. It maps centromeric to the gene that is mutant in multiple exostoses type I (EXT1; 133700); EXT1 is deleted in all patients with TRPS type II, or Langer-Giedion syndrome (150230), which combines features of TRPS I and multiple exostoses. Momeni et al. (2000) positionally cloned a gene that spanned the chromosomal breakpoint in 2 patients with TRPS I and was deleted in 5 patients with TRPS I associated with an interstitial deletion. Northern blot analyses revealed transcripts of 7 and 10.5 kb. The gene, designated TRPS1, has 7 exons and encodes a polypeptide of 1,281 amino acids. The predicted protein sequence has 2 potential nuclear localization signals and an unusual combination of different zinc finger motifs, including IKAROS-like (see 603023) and GATA-binding (see 600576) sequences. Momeni et al. (2000) identified 6 different nonsense mutations in 10 unrelated patients. The findings suggested that haploinsufficiency for this putative transcription factor causes TRPS I. To investigate whether trichorhinophalangeal syndrome type III (190351) is caused by TRPS1 mutations and to establish a genotype-phenotype correlation in TRPS, Ludecke et al. (2001) performed extensive mutation analysis and evaluated height and degree of brachydactyly in patients with TRPS I or TRPS III. They found 35 different mutations in 44 of 51 unrelated patients. The detection rate (86%) indicated that TRPS1 is the major locus for TRPS I and TRPS III. They found no mutation in the parents of sporadic patients or in apparently healthy relatives of familial patients, indicating complete penetrance of TRPS1 mutations. Evaluation of skeletal abnormalities of patients with TRPS1 mutations revealed a wide clinical spectrum. The phenotype was variable in unrelated, age- and sex-matched patients with identical mutations, as well as in families. Four of the 5 missense mutations altered the GATA DNA-binding zinc finger, and 6 of the 7 unrelated patients with these mutations could be classified as having TRPS III, because they had severe bradycardia, due to short metacarpals, and severe short stature. The data indicated that TRPS III is at the severe end of the TRPS spectrum and that it is most often caused by a specific class of mutations in exon 6 the TRPS1 gene. In the study of Ludecke et al. (2001), 5 mutations were recurrent, and 4 of these were identified in patients of different ethnicities: 1 in patients of Norwegian, Turkish, and Belgian extraction, and another in patients of Belgian, Turkish, and Japanese extraction, for example.

[0564] Full details of the abovementioned studies are described in the following publications, the disclosure of which are hereby incorporated by reference:
[0565] Momeni, P.; Glockner, G.; Schmidt, O.; von Holtum, D.; Albrecht, B.; Gillessen-Kaesbach, G.; Hennekam, R.; Meinecke, P.; Zabel, B.; Rosenthal, A.; Horsthemke, B.; Ludecke, H.-J.: Mutations in a new gene, encoding a zinc-finger protein, cause tricho-rhino-phalangeal syndrome type I. Nature Genet. 24: 71-74, 2000. PubMed ID: 10615131 Ludecke, H.-J.; Schaper, J.; Meinecke, P.; Momeni, P.; Gross, S.; von Holtum, D.; Hirche, H.; Abramowicz, M. J.; Albrecht, B.; Apacik, C.; Christen, H.-J.; Claussen, U.; and 28 others: Genotypic and phenotypic spectrum in tricho-rhino-phalangeal syndrome types I and III. Am. J. Hum. Genet. 68: 81-91, 2001.

[0566] Further studies establishing the function and utilities of TRPS1 are found in John Hopkins OMIM database record ID 604386, and in references numbered 65-71 listed hereinbelow.

[0567] Reference is now made to TRPS1 BINDING SITE. trichorhinophalangeal syndrome I (TRPS1) is a host target gene of VGAM18, corresponding to VGAM18-HOST-TARGET GENE of FIG. 18A. TRPS1 BINDING SITE is a host binding site found in the 3′ untranslated region of TRPS1, corresponding to HOST BINDING SITE of FIG. 18A. FIG. 18D illustrates the complementarity of the nucleotide sequence of TRPS1 BINDING SITE, designated SEQ ID:49, to the nucleotide sequence of VGAM18 RNA of FIG. 18A, designated SEQ ID:40.

[0568] A further function of VGAM18 is therefore inhibition of trichorhinophalangeal syndrome I (TRPS1), a host gene which encodes a transcripition factor that is associated with trichorhinophalangeal syndrome type I, type III, as part of a novel viral mechanism used by Equine herpesvirus 2 for attacking a host. Accordingly, utilities of VGAM18 include diagnosis, prevention and treatment of viral infection by Equine herpesvirus 2.

[0569] The function of TRPS1 has been established by previous studies. Trichorhinophalangeal syndrome type I (190350) is a malformation syndrome characterized by distinctive craniofacial and skeletal abnormalities and is inherited as an autosomal dominant. TRPS I patients have sparse scalp hair, bulbous tip of the nose, long flat philtrum, thin upper vermilion border, and protruding ears. Skeletal abnormalities include cone-shaped epiphyses at the phalanges, hip malformations, and short stature. Ludecke et al. (1995) and Hou et al. (1995) assigned the TRPS1 gene to 8q24. It maps centromeric to the gene that is mutant in multiple exostoses type I (EXT1; 133700); EXT1 is deleted in all patients with TRPS type II, or Langer-Giedion syndrome (150230), which combines features of TRPS I and multiple exostoses. Momeni et al. (2000) positionally cloned a gene that spanned the chromosomal breakpoint in 2 patients with TRPS I and was deleted in 5 patients with TRPS I associated with an interstitial deletion. Northern blot analyses revealed transcripts of 7 and 10.5 kb. The gene, designated TRPS1, has 7 exons and encodes a polypeptide of 1,281 amino acids. The predicted protein sequence has 2 potential nuclear localization signals and an unusual combination of different zinc finger motifs, including IKAROS-like (see 603023) and GATA-binding (see 600576) sequences. Momeni et al. (2000) identified 6 different nonsense mutations in 10 unrelated patients. The findings suggested that haploinsufficiency for this putative transcription factor causes TRPS I. To investigate whether trichorhinophalangeal syndrome type III (190351) is caused by TRPS1 mutations and to establish a genotype-phenotype correlation in TRPS, Ludecke et al. (2001) performed extensive mutation analysis and evaluated height and degree of brachydactyly in patients with TRPS I or TRPS III. They found 35 different mutations in 44 of 51 unrelated patients. The detection rate (86%) indicated that TRPS1 is the major locus for TRPS I and TRPS III. They found no mutation in the parents of sporadic patients or in apparently healthy relatives of familial patients, indicating complete penetrance of TRPS1 mutations. Evaluation of skeletal abnormalities of patients with TRPS1 mutations revealed a wide clinical spectrum. The phenotype was variable in unrelated, age- and sex-matched patients with identical mutations, as well as in families. Four of the 5 missense mutations altered the GATA DNA-binding zinc finger, and 6 of the 7 unrelated patients with these mutations could be classified as having TRPS III, because they had severe bradycardia, due to short metacarpals, and severe short stature. The data indicated that TRPS III is at the severe end of the TRPS spectrum and that it is most often caused by a specific class of mutations in exon 6 the TRPS1 gene. In the study of Ludecke et al. (2001), 5 mutations were recurrent, and 4 of these were identified in patients of different ethnicities: 1 in patients of Norwegian, Turkish, and Belgian extraction, and another in patients of Belgian, Turkish, and Japanese extraction, for example.

[0570] Full details of the abovementioned studies are described in the following publications, the disclosure of which are hereby incorporated by reference:
[0571] Momeni, P.; Glockner, G.; Schmidt, O.; von Holtum, D.; Albrecht, B.; Gillessen-Kaesbach, G.; Hennekam, R.; Meinecke, P.; Zabel, B.; Rosenthal, A.; Horsthemke, B.; Ludecke, H.-J.: Mutations in a new gene, encoding a zinc-finger protein, cause tricho-rhino-phalangeal syndrome type I. Nature Genet. 24: 71-74, 2000. PubMed ID: 10615131 Ludecke, H.-J.; Schaper, J.; Meinecke, P.; Momeni, P.; Gross, S.; von Holtum, D.; Hirche, H.; Abramowicz, M. J.; Albrecht, B.; Apacik, C.; Christen, H.-J.; Claussen, U.; and 28 others: Genotypic and phenotypic spectrum in tricho-rhino-phalangeal syndrome types I and III. Am. J. Hum. Genet. 68: 81-91, 2001.

[0572] Further studies establishing the function and utilities of TRPS1 are found in John Hopkins OMIM database record ID 604386, and in references numbered 65-71 listed hereinbelow.

[0573] Reference is now made to TRPS1 BINDING SITE. trichorhinophalangeal syndrome I (TRPS1) is a host target gene of VGAM18, corresponding to VGAM18-HOST-TARGET GENE of FIG. 18A. TRPS1 BINDING SITE is a host binding site found in the 3′ untranslated region of TRPS1, corresponding to HOST BINDING SITE of FIG. 18A. FIG. 18D illustrates the complementarity of the nucleotide sequence of TRPS1 BINDING SITE, designated SEQ ID:49, to the nucleotide sequence of VGAM18 RNA of FIG. 18A, designated SEQ ID:40.

[0574] A further function of VGAM18 is therefore inhibition of trichorhinophalangeal syndrome I (TRPS1), a host gene which encodes a transcripition factor that is associated with trichorhinophalangeal syndrome type I, type III, as part of a novel viral mechanism used by Equine herpesvirus 2 for attacking a host. Accordingly, utilities of VGAM18 include diagnosis, prevention and treatment of viral infection by Equine herpesvirus 2.

[0575] The function of TRPS1 has been established by previous studies. Trichorhinophalangeal syndrome type I (190350) is a malformation syndrome characterized by distinctive craniofacial and skeletal abnormalities and is inherited as an autosomal dominant. TRPS I patients have sparse scalp hair, bulbous tip of the nose, long flat philtrum, thin upper vermilion border, and protruding ears. Skeletal abnormalities include cone-shaped epiphyses at the phalanges, hip malformations, and short stature. Ludecke et al. (1995) and Hou et al. (1995) assigned the TRPS1 gene to 8q24. It maps centromeric to the gene that is mutant in multiple exostoses type I (EXT1; 133700); EXT1 is deleted in all patients with TRPS type II, or Langer-Giedion syndrome (150230), which combines features of TRPS I and multiple exostoses. Momeni et al. (2000) positionally cloned a gene that spanned the chromosomal breakpoint in 2 patients with TRPS I and was deleted in 5 patients with TRPS I associated with an interstitial deletion. Northern blot analyses revealed transcripts of 7 and 10.5 kb. The gene, designated TRPS1, has 7 exons and encodes a polypeptide of 1,281 amino acids. The predicted protein sequence has 2 potential nuclear localization signals and an unusual combination of different zinc finger motifs, including IKAROS-like (see 603023) and GATA-binding (see 600576) sequences. Momeni et al. (2000) identified 6 different nonsense mutations in 10 unrelated patients. The findings suggested that haploinsufficiency for this putative transcription factor causes TRPS I. To investigate whether trichorhinophalangeal syndrome type III (190351) is caused by TRPS1 mutations and to establish a genotype-phenotype correlation in TRPS, Ludecke et al. (2001) performed extensive mutation analysis and evaluated height and degree of brachydactyly in patients with TRPS I or TRPS III. They found 35 different mutations in 44 of 51 unrelated patients. The detection rate (86%) indicated that TRPS1 is the major locus for TRPS I and TRPS III. They found no mutation in the parents of sporadic patients or in apparently healthy relatives of familial patients, indicating complete penetrance of TRPS1 mutations. Evaluation of skeletal abnormalities of patients with TRPS1 mutations revealed a wide clinical spectrum. The phenotype was variable in unrelated, age- and sex-matched patients with identical mutations, as well as in families. Four of the 5 missense mutations altered the GATA DNA-binding zinc finger, and 6 of the 7 unrelated patients with these mutations could be classified as having TRPS III, because they had severe bradycardia, due to short metacarpals, and severe short stature. The data indicated that TRPS III is at the severe end of the TRPS spectrum and that it is most often caused by a specific class of mutations in exon 6 the TRPS1 gene. In the study of Ludecke et al. (2001), 5 mutations were recurrent, and 4 of these were identified in patients of different ethnicities: 1 in patients of Norwegian, Turkish, and Belgian extraction, and another in patients of Belgian, Turkish, and Japanese extraction, for example.

[0576] Full details of the abovementioned studies are described in the following publications, the disclosure of which are hereby incorporated by reference:
[0577] Momeni, P.; Glockner, G.; Schmidt, O.; von Holtum, D.; Albrecht, B.; Gillessen-Kaesbach, G.; Hennekam, R.; Meinecke, P.; Zabel, B.; Rosenthal, A.; Horsthemke, B.; Ludecke, H.-J.: Mutations in a new gene, encoding a zinc-finger protein, cause tricho-rhino-phalangeal syndrome type I. Nature Genet. 24: 71-74, 2000. PubMed ID: 10615131 Ludecke, H.-J.; Schaper, J.; Meinecke, P.; Momeni, P.; Gross, S.; von Holtum, D.; Hirche, H.; Abramowicz, M. J.; Albrecht, B.; Apacik, C.; Christen, H.-J.; Claussen, U.; and 28 others: Genotypic and phenotypic spectrum in tricho-rhino-phalangeal syndrome types I and III. Am. J. Hum. Genet. 68: 81-91, 2001.

[0578] Further studies establishing the function and utilities of TRPS1 are found in John Hopkins OMIM database record ID 604386, and in references numbered 65-71 listed hereinbelow.

[0579] Reference is now made to TRPS1 BINDING SITE. trichorhinophalangeal syndrome I (TRPS1) is a host target gene of VGAM18, corresponding to VGAM18-HOST-TARGET GENE of FIG. 18A. TRPS1 BINDING SITE is a host binding site found in the 3′ untranslated region of TRPS1, corresponding to HOST BINDING SITE of FIG. 18A. FIG. 18D illustrates the complementarity of the nucleotide sequence of TRPS1 BINDING SITE, designated SEQ ID:49, to the nucleotide sequence of VGAM18 RNA of FIG. 18A, designated SEQ ID:40.

[0580] A further function of VGAM18 is therefore inhibition of trichorhinophalangeal syndrome I (TRPS1), a host gene which encodes a transcripition factor that is associated with trichorhinophalangeal syndrome type I, type III, as part of a novel viral mechanism used by Equine herpesvirus 2 for attacking a host. Accordingly, utilities of VGAM18 include diagnosis, prevention and treatment of viral infection by Equine herpesvirus 2.

[0581] The function of TRPS1 has been established by previous studies. Trichorhinophalangeal syndrome type I (190350) is a malformation syndrome characterized by distinctive craniofacial and skeletal abnormalities and is inherited as an autosomal dominant. TRPS I patients have sparse scalp hair, bulbous tip of the nose, long flat philtrum, thin upper vermilion border, and protruding ears. Skeletal abnormalities include cone-shaped epiphyses at the phalanges, hip malformations, and short stature. Ludecke et al. (1995) and Hou et al. (1995) assigned the TRPS1 gene to 8q24. It maps centromeric to the gene that is mutant in multiple exostoses type I (EXT1; 133700); EXT1 is deleted in all patients with TRPS type II, or Langer-Giedion syndrome (150230), which combines features of TRPS I and multiple exostoses. Momeni et al. (2000) positionally cloned a gene that spanned the chromosomal breakpoint in 2 patients with TRPS I and was deleted in 5 patients with TRPS I associated with an interstitial deletion. Northern blot analyses revealed transcripts of 7 and 10.5 kb. The gene, designated TRPS1, has 7 exons and encodes a polypeptide of 1,281 amino acids. The predicted protein sequence has 2 potential nuclear localization signals and an unusual combination of different zinc finger motifs, including IKAROS-like (see 603023) and GATA-binding (see 600576) sequences. Momeni et al. (2000) identified 6 different nonsense mutations in 10 unrelated patients. The findings suggested that haploinsufficiency for this putative transcription factor causes TRPS I. To investigate whether trichorhinophalangeal syndrome type III (190351) is caused by TRPS1 mutations and to establish a genotype-phenotype correlation in TRPS, Ludecke et al. (2001) performed extensive mutation analysis and evaluated height and degree of brachydactyly in patients with TRPS I or TRPS III. They found 35 different mutations in 44 of 51 unrelated patients. The detection rate (86%) indicated that TRPS1 is the major locus for TRPS I and TRPS III. They found no mutation in the parents of sporadic patients or in apparently healthy relatives of familial patients, indicating complete penetrance of TRPS1 mutations. Evaluation of skeletal abnormalities of patients with TRPS1 mutations revealed a wide clinical spectrum. The phenotype was variable in unrelated, age- and sex-matched patients with identical mutations, as well as in families. Four of the 5 missense mutations altered the GATA DNA-binding zinc finger, and 6 of the 7 unrelated patients with these mutations could be classified as having TRPS III, because they had severe bradycardia, due to short metacarpals, and severe short stature. The data indicated that TRPS III is at the severe end of the TRPS spectrum and that it is most often caused by a specific class of mutations in exon 6 the TRPS1 gene. In the study of Ludecke et al. (2001), 5 mutations were recurrent, and 4 of these were identified in patients of different ethnicities: 1 in patients of Norwegian, Turkish, and Belgian extraction, and another in patients of Belgian, Turkish, and Japanese extraction, for example.

[0582] Full details of the abovementioned studies are described in the following publications, the disclosure of which are hereby incorporated by reference:
[0583] Momeni, P.; Glockner, G.; Schmidt, O.; von Holtum, D.; Albrecht, B.; Gillessen-Kaesbach, G.; Hennekam, R.; Meinecke, P.; Zabel, B.; Rosenthal, A.; Horsthemke, B.; Ludecke, H.-J.: Mutations in a new gene, encoding a zinc-finger protein, cause tricho-rhino-phalangeal syndrome type I. Nature Genet. 24: 71-74, 2000. PubMed ID: 10615131 Ludecke, H.-J.; Schaper, J.; Meinecke, P.; Momeni, P.; Gross, S.; von Holtum, D.; Hirche, H.; Abramowicz, M. J.; Albrecht, B.; Apacik, C.; Christen, H.-J.; Claussen, U.; and 28 others: Genotypic and phenotypic spectrum in tricho-rhino-phalangeal syndrome types I and III. Am. J. Hum. Genet. 68: 81-91, 2001.

[0584] Further studies establishing the function and utilities of TRPS1 are found in John Hopkins OMIM database record ID 604386, and in references numbered 65-71 listed hereinbelow.

[0585] Reference is now made to FIG. 19A, which is a simplified diagram providing a conceptual explanation of the mode by which a novel bioinformatically detected viral gene, referred to here as Viral Genomic Address Messenger 19 (VGAM19) modulates expression of host target genes thereof, the function and utility of which host target genes is known in the art.

[0586] VGAM19 is a novel bioinformatically detected regulatory, non protein coding, viral micro RNA (miRNA) gene. The method by which VGAM19 was detected is described hereinabove with reference to FIGS. 2-8.

[0587] VGAM19 GENE is a viral gene contained in the genome of Alcelaphine herpesvirus 1. VGAM19-HOST TARGET GENE is a human gene contained in the human genome.

[0588] VGAM19 GENE encodes a VGAM19 PRECURSOR RNA. Similar to other miRNA genes, and unlike most ordinary genes, the RNA transcribed by VGAM19, VGAM19 PRECURSOR RNA, does not encoded a protein.

[0589] VGAM19 PRECURSOR RNA folds onto itself, forming VGAM19 FOLDED PRECURSOR RNA. As FIG. 19 illustrates, VGAM19 FOLDED PRECURSOR RNA forms a ‘hairpin structure’, folding onto itself. As is well known in the art, this ‘hairpin structure’, is typical of RNA encoded by miRNA genes, and is due to the fact that the nucleotide sequence of the first half of the RNA encoded by a miRNA gene is an accurate or partial inversed-reversed sequence of the nucleotide sequence of the second half thereof. By “inversed-reversed” is meant a sequence which is reversed and wherein each nucleotide is replaced by a complimentary nucleotide, as is well known in the art (e.g. ATGGC is the inversed-reversed sequence of GCCAT).

[0590] An enzyme complex designated DICER COMPLEX, ‘dices’ the VGAM19 FOLDED PRECURSOR RNA into a single stranded ˜22 nt long RNA segment, designated VGAM19 RNA. As is known in the art, ‘dicing’ of a hairpin structured RNA precursor product into short a ˜22 nt RNA segment is catalyzed by an enzyme complex comprising an enzyme called Dicer together with other necessary proteins.

[0591] VGAM19-HOST TARGET GENE encodes a corresponding messenger RNA, designated VGAM19-HOST-TARGET RNA. VGAM19-HOST-TARGET RNA comprises three regions, as is typical of mRNA of a protein coding gene: a 5′ untranslated region, a protein coding region and a 3′ untranslated region, designated 5′UTR, PROTEIN CODING and 3′UTR respectively.

[0592] VGAM19 RNA binds complimentarily to a HOST BINDING SITE, located on an untranslated region of VGAM19-HOST-TARGET RNA. This complimentarily binding is due to the fact that the nucleotide sequence of VGAM19 RNA is an accurate or a partial inversed-reversed sequence of the nucleotide sequence of HOST BINDING SITE. It is appreciated that while FIG. 19A depicts the HOST BINDING SITE on the 3′UTR region, this is meant as an example only—the HOST BINDING SITE may be located on the 5′UTR region as well.

[0593] The complimentary binding of VGAM19 RNA to HOST BINDING SITE inhibits translation of VGAM19-HOST-TARGET RNA into VGAM19-HOST-TARGET PROTEIN. VGAM19-HOST-TARGET PROTEIN is therefore outlined by a broken line.

[0594] It is appreciated that VGAM19-HOST-TARGET GENE in fact represents a plurality of host target genes of VGAM19. The mRNA of each of this plurality of host target genes of VGAM19 comprises a HOST BINDING SITE, having a nucleotide sequence which is at least partly complementary to VGAM19 RNA, and which when bound by VGAM19 RNA causes inhibition of translation of one of a plurality of host target proteins of VGAM19. The plurality of host target genes of VGAM19 and their respective host binding sites, are described hereinbelow with reference to FIG. 19D.

[0595] It is appreciated by one skilled in the art that the mode of translational inhibition illustrated by FIG. 19A with specific reference to translational inhibition exerted by VGAM19 on one or more host target genes of VGAM19, is in fact common to other known miRNA genes. As mentioned hereinabove with reference to the background section, although a specific complimentary binding site has been demonstrated only for miRNA genes Lin-4 and Let-7, all other recently discovered miRNA genes are also believed by those skilled in the art to modulate expression of other genes by complimentary binding, although specific complimentary binding sites of these genes have not yet been found (Ruvkun G., ‘Perspective: Glimpses of a tiny RNA world’, Science 294, 779 (2001)).

[0596] It is further appreciated that a function of VGAM19 is inhibition of expression of host target genes, as part of a novel viral mechanism of attacking a host. Accordingly, utilities of VGAM19 include diagnosis, prevention and treatment of viral infection by Alcelaphine herpesvirus 1.

[0597] Reference is now made to FIG. 19B which shows the nucleotide sequence of VGAM19 PRECURSOR RNA of FIG. 19A, designated SEQ ID:65, and a probable nucleotide sequence of VGAM19 RNA of FIG. 19A, designated SEQ ID:66. The nucleotide sequence of SEQ ID:66, which is highly likely (over 35%) to be identical or highly similar to that of VGAM19, is marked by an underline within the sequence of VGAM19 PRECURSOR RNA.

[0598] Reference is now made to FIG. 19C, which shows the secondary folding of VGAM19 PRECURSOR RNA, forming a ‘hairpin structure’ designated VGAM19 FOLDED PRECURSOR RNA, both of FIG. 19A. A probable (>35%) nucleotide sequence of VGAM19 RNA, designated SEQ ID:66 of FIG. 19B, is marked by an underline on VGAM19 FOLDED PRECURSOR RNA. It is appreciated that the complimentary base-paring is not perfect, with ‘bulges’, as is well known in the art with respect to the RNA folding of all known miRNA genes.

[0599] Reference is now made to FIG. 19D, which is a table showing binding sites found in untranslated regions of a plurality of host target genes of VGAM19, each binding site corresponding to HOST BINDING SITE of FIG. 19A, and their complementarity to SEQ ID:66, which is highly likely (>35%) to be identical or highly similar to the nucleotide sequence of VGAM19 RNA of FIG. 19A.

[0600] As mentioned hereinabove with reference to FIG. 19A a function of VGAM19 is inhibition of expression of host target genes, as part of a novel viral mechanism of attacking a host. Accordingly, utilities of VGAM19 include diagnosis, prevention and treatment of viral infection by Alcelaphine herpesvirus 1. It is appreciated that specific functions, and accordingly utilities, of VGAM19 correlate with, and may be deduced from, the identity of the host target genes which VGAM19 binds and inhibits, and the function of these host target genes, as elaborated hereinbelow.

[0601] Reference is now made to DLG5 BINDING SITE. discs, large (Drosophila) homolog 5 (DLG5) is a host target gene of VGAM19, corresponding to VGAM19-HOST-TARGET GENE of FIG. 19A. DLG5 BINDING SITE is a host binding site found in the 3′ untranslated region of DLG5, corresponding to HOST BINDING SITE of FIG. 19A. FIG. 19D illustrates the complementarity of the nucleotide sequence of DLG5 BINDING SITE, designated SEQ ID:67, to the nucleotide sequence of VGAM19 RNA of FIG. 19A, designated SEQ ID:66.

[0602] a function of VGAM19 is therefore inhibition of discs, large (Drosophila) homolog 5 (DLG5), a host gene which encodes a Protein that may transmit extracellular signals to inhibit cell proliferation., as part of a novel viral mechanism used by Alcelaphine herpesvirus 1 for attacking a host. Accordingly, utilities of VGAM19 include diagnosis, prevention and treatment of viral infection by Alcelaphine herpesvirus 1.

[0603] The function of DLG5 has been established by previous studies. Vertebrate homologs of the Drosophila discs large (dlg) gene are members of the MAGUK (membrane-associated guanylate kinase) family. See 602887. MAGUK proteins contain PDZ motifs, an SH3 domain, and a guanylate kinase (GUK)-homologous region. Both the PDZ and GUK domains are thought to contribute to protein-protein interactions. By searching an EST database for sequences related to Drosophila dlg, Nakamura et al. (1998) identified cDNAs encoding a novel human homolog. Northern blot analysis revealed that the 9.4-kb transcript was highly expressed in placenta and prostate, as well as in several other tissues, leading the authors to designate the gene PDLG (placenta and prostate DLG). An additional 8.8-kb PDLG mRNA was detected in thyroid. The predicted 859-amino acid PDLG protein contains 3 PDZ domains, an SH3 domain, and a GUK region. PDLG is 45% and 40% identical to DLG1 (601014) and Drosophila dlg, respectively. Western blot analysis of extracts of human prostate tissue and various cell lines showed that PDLG has an apparent molecular mass of 105 kD. Immunofluorescence experiments indicated that PDLG is localized at the plasma membrane and cytoplasm, and is expressed in the gland epithelial cells of normal prostate tissue but not in prostate cell lines. Using a yeast 2-hybrid screen, Nakamura et al. (1998) determined that PDLG interacts with the GUK domain of p55 (MPP1; 305360), a palmitoylated erythrocyte membrane MAGUK protein. The authors suggested that PDLG and p55 form a heteromeric MAGUK complex at the plasma membrane and cluster various intracellular molecules to play roles in maintaining the structure of epithelial cells and transmitting extracellular signals to the membrane and cytoskeleton. Independently, Nagase et al. (1998) identified KIAA0583, a DLG5 cDNA. By radiation hybrid analysis, they mapped the DLG5 gene to chromosome 10. Using the same technique, Nakamura et al. (1998) refined the localization of the DLG5 gene to 10q23.

[0604] Full details of the abovementioned studies are described in the following publications, the disclosure of which are hereby incorporated by reference:
[0605] agase, T.; Ishikawa, K.; Miyajima, N.; Tanaka, A.; Kotani, H.; Nomura, N.; Ohara, O.: Prediction of the coding sequences of unidentified human genes. IX. The complete sequences of 100 new cDNA clones from brain which can code for large proteins in vitro. DNA Res. 5: 31-39, 1998. PubMed ID: 9628581 2. Nakamura, H.; Sudo, T.; Tsuiki, H.; Miyake, H.; Morisaki, T.; Sasaki, J.; Masuko, N.; Kochi, M.; Ushio, Y.; Saya, H.: Identification of a novel human homolog of the Drosophila dlg, P-dlg, specifically expressed in the gland tissues and interacting with p55. FEBS Lett. 433: 63-67, 1998.

[0606] Further studies establishing the function and utilities of DLG5 are found in John Hopkins OMIM database record ID 604090, and in references numbered 72-73 listed hereinbelow.

[0607] Reference is now made to RBBP9 BINDING SITE. retinoblastoma-binding protein 9 (RBBP9) is a host target gene of VGAM19, corresponding to VGAM19-HOST-TARGET GENE of FIG. 19A. RBBP9 BINDING SITE is a host binding site found in the 3′ untranslated region of RBBP9, corresponding to HOST BINDING SITE of FIG. 19A. FIG. 19D illustrates the complementarity of the nucleotide sequence of RBBP9 BINDING SITE, designated SEQ ID:68, to the nucleotide sequence of VGAM19 RNA of FIG. 19A, designated SEQ ID:66.

[0608] Yet another function of VGAM19 is therefore inhibition of retinoblastoma-binding protein 9 (RBBP9), a host gene which encodes a Protein that is a retinoblastoma-binding protein and is associated with cancer, as part of a novel viral mechanism used by Alcelaphine herpesvirus 1 for attacking a host. Accordingly, utilities of VGAM19 include diagnosis, prevention and treatment of viral infection by Alcelaphine herpesvirus 1.

[0609] The function of RBBP9 has been established by previous studies. The retinoblastoma (RB1; 180200) gene is one of the most extensively studied tumor-suppressor genes, in part, perhaps, because it was the first in which the Knudson 2-hit model of tumorigenesis in familial cancer syndromes was established at the molecular level. Deletion or inactivation of both RB alleles is an essential, rate-limiting step in the formation of retinoblastoma and osteosarcoma. RB inactivation is also found in other human tumors, such as breast cancer (Lee et al., 1988), small-cell carcinoma of the lung (Yokota et al., 1988), glioblastoma (Venter et al., 1991), and acute lymphoblastic leukemia (Cheng et al., 1990). Loss of RB function is associated with loss of cellular proliferative control; introduction of a wildtype RB can suppress cell growth and tumorigenicity. Woitach et al. (1998) described a new gene, designated BOG (B5T overexpressed gene), which was shown to be overexpressed in several transformed rat liver epithelial (RLE) cell lines resistant to the growth-inhibitory effect of TGF-beta-1 (TGFB1; 190180), as well as in primary human liver tumors. The Bog protein was found to share homology with other retinoblastoma-binding proteins and contained the RB-binding motif LXCXE. Using the yeast 2-hybrid system and coimmunoprecipitation, Woitach et al. (1998) demonstrated that Bog binds to the RB1 gene product. In vivo, Bog/Rb complexes do not contain E2F1 (189971), and Bog can displace E2F1 from E2F1/Rb complexes in vitro. Overexpression of Bog in normal RLE cells conferred resistance to the growth-inhibitory effect of TGF-beta-1. Furthermore, normal RLE cells were rapidly transformed when Bog was continuously overexpressed and formed hepatoblastoma-like tumors when transplanted into nude mice. These data suggested that Bog may be important in the transformation process, in part due to its capacity to transfer resistance to the growth-inhibitory effects of TGF-beta-1 through interaction with RB and the subsequent displacement of E2F1.

[0610] Full details of the abovementioned studies are described in the following publications, the disclosure of which are hereby incorporated by reference:
[0611] oitach, J. T.; Zhang, M.; Niu, C.-H.; Thorgeirsson, S. S.: A retinoblastoma-binding protein that affects cell-cycle control and confers transforming ability. Nature Genet. 19: 371-374, 1998.

[0612] Further studies establishing the function and utilities of RBBP9 are found in John Hopkins OMIM database record ID 602908, and in references numbered 74-79 listed hereinbelow.

[0613] Reference is now made to RBBP9 BINDING SITE. retinoblastoma-binding protein 9 (RBBP9) is a host target gene of VGAM19, corresponding to VGAM19-HOST-TARGET GENE of FIG. 19A. RBBP9 BINDING SITE is a host binding site found in the 3′ untranslated region of RBBP9, corresponding to HOST BINDING SITE of FIG. 19A. FIG. 19D illustrates the complementarity of the nucleotide sequence of RBBP9 BINDING SITE, designated SEQ ID:68, to the nucleotide sequence of VGAM19 RNA of FIG. 19A, designated SEQ ID:66.

[0614] Yet another function of VGAM19 is therefore inhibition of retinoblastoma-binding protein 9 (RBBP9), a host gene which encodes a Protein that is a retinoblastoma-binding protein and is associated with cancer, as part of a novel viral mechanism used by Alcelaphine herpesvirus 1 for attacking a host. Accordingly, utilities of VGAM19 include diagnosis, prevention and treatment of viral infection by Alcelaphine herpesvirus 1.

[0615] The function of RBBP9 has been established by previous studies. The retinoblastoma (RB1; 180200) gene is one of the most extensively studied tumor-suppressor genes, in part, perhaps, because it was the first in which the Knudson 2-hit model of tumorigenesis in familial cancer syndromes was established at the molecular level. Deletion or inactivation of both RB alleles is an essential, rate-limiting step in the formation of retinoblastoma and osteosarcoma. RB inactivation is also found in other human tumors, such as breast cancer (Lee et al., 1988), small-cell carcinoma of the lung (Yokota et al., 1988), glioblastoma (Venter et al., 1991), and acute lymphoblastic leukemia (Cheng et al., 1990). Loss of RB function is associated with loss of cellular proliferative control; introduction of a wildtype RB can suppress cell growth and tumorigenicity. Woitach et al. (1998) described a new gene, designated BOG (B5T overexpressed gene), which was shown to be overexpressed in several transformed rat liver epithelial (RLE) cell lines resistant to the growth-inhibitory effect of TGF-beta-1 (TGFB1; 190180), as well as in primary human liver tumors. The Bog protein was found to share homology with other retinoblastoma-binding proteins and contained the RB-binding motif LXCXE. Using the yeast 2-hybrid system and coimmunoprecipitation, Woitach et al. (1998) demonstrated that Bog binds to the RB1 gene product. In vivo, Bog/Rb complexes do not contain E2F1 (189971), and Bog can displace E2F1 from E2F1/Rb complexes in vitro. Overexpression of Bog in normal RLE cells conferred resistance to the growth-inhibitory effect of TGF-beta-1. Furthermore, normal RLE cells were rapidly transformed when Bog was continuously overexpressed and formed hepatoblastoma-like tumors when transplanted into nude mice. These data suggested that Bog may be important in the transformation process, in part due to its capacity to transfer resistance to the growth-inhibitory effects of TGF-beta-1 through interaction with RB and the subsequent displacement of E2F1.

[0616] Full details of the abovementioned studies are described in the following publications, the disclosure of which are hereby incorporated by reference:
[0617] oitach, J. T.; Zhang, M.; Niu, C.-H.; Thorgeirsson, S. S.: A retinoblastoma-binding protein that affects cell-cycle control and confers transforming ability. Nature Genet. 19: 371-374, 1998.

[0618] Further studies establishing the function and utilities of RBBP9 are found in John Hopkins OMIM database record ID 602908, and in references numbered 74-79 listed hereinbelow.

[0619] Reference is now made to RBBP9 BINDING SITE. retinoblastoma-binding protein 9 (RBBP9) is a host target gene of VGAM19, corresponding to VGAM19-HOST-TARGET GENE of FIG. 19A. RBBP9 BINDING SITE is a host binding site found in the 3′ untranslated region of RBBP9, corresponding to HOST BINDING SITE of FIG. 19A. FIG. 19D illustrates the complementarity of the nucleotide sequence of RBBP9 BINDING SITE, designated SEQ ID:68, to the nucleotide sequence of VGAM19 RNA of FIG. 19A, designated SEQ ID:66.

[0620] Yet another function of VGAM19 is therefore inhibition of retinoblastoma-binding protein 9 (RBBP9), a host gene which encodes a Protein that is a retinoblastoma-binding protein and is associated with cancer, as part of a novel viral mechanism used by Alcelaphine herpesvirus 1 for attacking a host. Accordingly, utilities of VGAM19 include diagnosis, prevention and treatment of viral infection by Alcelaphine herpesvirus 1.

[0621] The function of RBBP9 has been established by previous studies. The retinoblastoma (RB1; 180200) gene is one of the most extensively studied tumor-suppressor genes, in part, perhaps, because it was the first in which the Knudson 2-hit model of tumorigenesis in familial cancer syndromes was established at the molecular level. Deletion or inactivation of both RB alleles is an essential, rate-limiting step in the formation of retinoblastoma and osteosarcoma. RB inactivation is also found in other human tumors, such as breast cancer (Lee et al., 1988), small-cell carcinoma of the lung (Yokota et al., 1988), glioblastoma (Venter et al., 1991), and acute lymphoblastic leukemia (Cheng et al., 1990). Loss of RB function is associated with loss of cellular proliferative control; introduction of a wildtype RB can suppress cell growth and tumorigenicity. Woitach et al. (1998) described a new gene, designated BOG (B5T overexpressed gene), which was shown to be overexpressed in several transformed rat liver epithelial (RLE) cell lines resistant to the growth-inhibitory effect of TGF-beta-1 (TGFB1; 190180), as well as in primary human liver tumors. The Bog protein was found to share homology with other retinoblastoma-binding proteins and contained the RB-binding motif LXCXE. Using the yeast 2-hybrid system and coimmunoprecipitation, Woitach et al. (1998) demonstrated that Bog binds to the RB1 gene product. In vivo, Bog/Rb complexes do not contain E2F1 (189971), and Bog can displace E2F1 from E2F1/Rb complexes in vitro. Overexpression of Bog in normal RLE cells conferred resistance to the growth-inhibitory effect of TGF-beta-1. Furthermore, normal RLE cells were rapidly transformed when Bog was continuously overexpressed and formed hepatoblastoma-like tumors when transplanted into nude mice. These data suggested that Bog may be important in the transformation process, in part due to its capacity to transfer resistance to the growth-inhibitory effects of TGF-beta-1 through interaction with RB and the subsequent displacement of E2F1.

[0622] Full details of the abovementioned studies are described in the following publications, the disclosure of which are hereby incorporated by reference:
[0623] oitach, J. T.; Zhang, M.; Niu, C.-H.; Thorgeirsson, S. S.: A retinoblastoma-binding protein that affects cell-cycle control and confers transforming ability. Nature Genet. 19: 371-374, 1998.

[0624] Further studies establishing the function and utilities of RBBP9 are found in John Hopkins OMIM database record ID 602908, and in references numbered 74-79 listed hereinbelow.

[0625] Reference is now made to RBBP9 BINDING SITE. retinoblastoma-binding protein 9 (RBBP9) is a host target gene of VGAM19, corresponding to VGAM19-HOST-TARGET GENE of FIG. 19A. RBBP9 BINDING SITE is a host binding site found in the 3′ untranslated region of RBBP9, corresponding to HOST BINDING SITE of FIG. 19A. FIG. 19D illustrates the complementarity of the nucleotide sequence of RBBP9 BINDING SITE, designated SEQ ID:68, to the nucleotide sequence of VGAM19 RNA of FIG. 19A, designated SEQ ID:66.

[0626] Yet another function of VGAM19 is therefore inhibition of retinoblastoma-binding protein 9 (RBBP9), a host gene which encodes a Protein that is a retinoblastoma-binding protein and is associated with cancer, as part of a novel viral mechanism used by Alcelaphine herpesvirus 1 for attacking a host. Accordingly, utilities of VGAM19 include diagnosis, prevention and treatment of viral infection by Alcelaphine herpesvirus 1.

[0627] The function of RBBP9 has been established by previous studies. The retinoblastoma (RB1; 180200) gene is one of the most extensively studied tumor-suppressor genes, in part, perhaps, because it was the first in which the Knudson 2-hit model of tumorigenesis in familial cancer syndromes was established at the molecular level. Deletion or inactivation of both RB alleles is an essential, rate-limiting step in the formation of retinoblastoma and osteosarcoma. RB inactivation is also found in other human tumors, such as breast cancer (Lee et al., 1988), small-cell carcinoma of the lung (Yokota et al., 1988), glioblastoma (Venter et al., 1991), and acute lymphoblastic leukemia (Cheng et al., 1990). Loss of RB function is associated with loss of cellular proliferative control; introduction of a wildtype RB can suppress cell growth and tumorigenicity. Woitach et al. (1998) described a new gene, designated BOG (B5T overexpressed gene), which was shown to be overexpressed in several transformed rat liver epithelial (RLE) cell lines resistant to the growth-inhibitory effect of TGF-beta-1 (TGFB1; 190180), as well as in primary human liver tumors. The Bog protein was found to share homology with other retinoblastoma-binding proteins and contained the RB-binding motif LXCXE. Using the yeast 2-hybrid system and coimmunoprecipitation, Woitach et al. (1998) demonstrated that Bog binds to the RB1 gene product. In vivo, Bog/Rb complexes do not contain E2F1 (189971), and Bog can displace E2F1 from E2F1/Rb complexes in vitro. Overexpression of Bog in normal RLE cells conferred resistance to the growth-inhibitory effect of TGF-beta-1. Furthermore, normal RLE cells were rapidly transformed when Bog was continuously overexpressed and formed hepatoblastoma-like tumors when transplanted into nude mice. These data suggested that Bog may be important in the transformation process, in part due to its capacity to transfer resistance to the growth-inhibitory effects of TGF-beta-1 through interaction with RB and the subsequent displacement of E2F1.

[0628] Full details of the abovementioned studies are described in the following publications, the disclosure of which are hereby incorporated by reference:
[0629] oitach, J. T.; Zhang, M.; Niu, C.-H.; Thorgeirsson, S. S.: A retinoblastoma-binding protein that affects cell-cycle control and confers transforming ability. Nature Genet. 19: 371-374, 1998.

[0630] Further studies establishing the function and utilities of RBBP9 are found in John Hopkins OMIM database record ID 602908, and in references numbered 74-79 listed hereinbelow.

[0631] Reference is now made to RBBP9 BINDING SITE. retinoblastoma-binding protein 9 (RBBP9) is a host target gene of VGAM19, corresponding to VGAM19-HOST-TARGET GENE of FIG. 19A. RBBP9 BINDING SITE is a host binding site found in the 3′ untranslated region of RBBP9, corresponding to HOST BINDING SITE of FIG. 19A. FIG. 19D illustrates the complementarity of the nucleotide sequence of RBBP9 BINDING SITE, designated SEQ ID:68, to the nucleotide sequence of VGAM19 RNA of FIG. 19A, designated SEQ ID:66.

[0632] Yet another function of VGAM19 is therefore inhibition of retinoblastoma-binding protein 9 (RBBP9), a host gene which encodes a Protein that is a retinoblastoma-binding protein and is associated with cancer, as part of a novel viral mechanism used by Alcelaphine herpesvirus 1 for attacking a host. Accordingly, utilities of VGAM19 include diagnosis, prevention and treatment of viral infection by Alcelaphine herpesvirus 1.

[0633] The function of RBBP9 has been established by previous studies. The retinoblastoma (RB1; 180200) gene is one of the most extensively studied tumor-suppressor genes, in part, perhaps, because it was the first in which the Knudson 2-hit model of tumorigenesis in familial cancer syndromes was established at the molecular level. Deletion or inactivation of both RB alleles is an essential, rate-limiting step in the formation of retinoblastoma and osteosarcoma. RB inactivation is also found in other human tumors, such as breast cancer (Lee et al., 1988), small-cell carcinoma of the lung (Yokota et al., 1988), glioblastoma (Venter et al., 1991), and acute lymphoblastic leukemia (Cheng et al., 1990). Loss of RB function is associated with loss of cellular proliferative control; introduction of a wildtype RB can suppress cell growth and tumorigenicity. Woitach et al. (1998) described a new gene, designated BOG (B5T overexpressed gene), which was shown to be overexpressed in several transformed rat liver epithelial (RLE) cell lines resistant to the growth-inhibitory effect of TGF-beta-1 (TGFB1; 190180), as well as in primary human liver tumors. The Bog protein was found to share homology with other retinoblastoma-binding proteins and contained the RB-binding motif LXCXE. Using the yeast 2-hybrid system and coimmunoprecipitation, Woitach et al. (1998) demonstrated that Bog binds to the RB1 gene product. In vivo, Bog/Rb complexes do not contain E2F1 (189971), and Bog can displace E2F1 from E2F1/Rb complexes in vitro. Overexpression of Bog in normal RLE cells conferred resistance to the growth-inhibitory effect of TGF-beta-1. Furthermore, normal RLE cells were rapidly transformed when Bog was continuously overexpressed and formed hepatoblastoma-like tumors when transplanted into nude mice. These data suggested that Bog may be important in the transformation process, in part due to its capacity to transfer resistance to the growth-inhibitory effects of TGF-beta-1 through interaction with RB and the subsequent displacement of E2F1.

[0634] Full details of the abovementioned studies are described in the following publications, the disclosure of which are hereby incorporated by reference:
[0635] oitach, J. T.; Zhang, M.; Niu, C.-H.; Thorgeirsson, S. S.: A retinoblastoma-binding protein that affects cell-cycle control and confers transforming ability. Nature Genet. 19: 371-374, 1998.

[0636] Further studies establishing the function and utilities of RBBP9 are found in John Hopkins OMIM database record ID 602908, and in references numbered 74-79 listed hereinbelow.

[0637] Reference is now made to RBBP9 BINDING SITE. retinoblastoma-binding protein 9 (RBBP9) is a host target gene of VGAM19, corresponding to VGAM19-HOST-TARGET GENE of FIG. 19A. RBBP9 BINDING SITE is a host binding site found in the 3′ untranslated region of RBBP9, corresponding to HOST BINDING SITE of FIG. 19A. FIG. 19D illustrates the complementarity of the nucleotide sequence of RBBP9 BINDING SITE, designated SEQ ID:68, to the nucleotide sequence of VGAM19 RNA of FIG. 19A, designated SEQ ID:66.

[0638] Yet another function of VGAM19 is therefore inhibition of retinoblastoma-binding protein 9 (RBBP9), a host gene which encodes a Protein that is a retinoblastoma-binding protein and is associated with cancer, as part of a novel viral mechanism used by Alcelaphine herpesvirus 1 for attacking a host. Accordingly, utilities of VGAM19 include diagnosis, prevention and treatment of viral infection by Alcelaphine herpesvirus 1.

[0639] The function of RBBP9 has been established by previous studies. The retinoblastoma (RB1; 180200) gene is one of the most extensively studied tumor-suppressor genes, in part, perhaps, because it was the first in which the Knudson 2-hit model of tumorigenesis in familial cancer syndromes was established at the molecular level. Deletion or inactivation of both RB alleles is an essential, rate-limiting step in the formation of retinoblastoma and osteosarcoma. RB inactivation is also found in other human tumors, such as breast cancer (Lee et al., 1988), small-cell carcinoma of the lung (Yokota et al., 1988), glioblastoma (Venter et al., 1991), and acute lymphoblastic leukemia (Cheng et al., 1990). Loss of RB function is associated with loss of cellular proliferative control; introduction of a wildtype RB can suppress cell growth and tumorigenicity. Woitach et al. (1998) described a new gene, designated BOG (B5T overexpressed gene), which was shown to be overexpressed in several transformed rat liver epithelial (RLE) cell lines resistant to the growth-inhibitory effect of TGF-beta-1 (TGFB1; 190180), as well as in primary human liver tumors. The Bog protein was found to share homology with other retinoblastoma-binding proteins and contained the RB-binding motif LXCXE. Using the yeast 2-hybrid system and coimmunoprecipitation, Woitach et al. (1998) demonstrated that Bog binds to the RB1 gene product. In vivo, Bog/Rb complexes do not contain E2F1 (189971), and Bog can displace E2F1 from E2F1/Rb complexes in vitro. Overexpression of Bog in normal RLE cells conferred resistance to the growth-inhibitory effect of TGF-beta-1. Furthermore, normal RLE cells were rapidly transformed when Bog was continuously overexpressed and formed hepatoblastoma-like tumors when transplanted into nude mice. These data suggested that Bog may be important in the transformation process, in part due to its capacity to transfer resistance to the growth-inhibitory effects of TGF-beta-1 through interaction with RB and the subsequent displacement of E2F1.

[0640] Full details of the abovementioned studies are described in the following publications, the disclosure of which are hereby incorporated by reference:
[0641] oitach, J. T.; Zhang, M.; Niu, C.-H.; Thorgeirsson, S. S.: A retinoblastoma-binding protein that affects cell-cycle control and confers transforming ability. Nature Genet. 19: 371-374, 1998.

[0642] Further studies establishing the function and utilities of RBBP9 are found in John Hopkins OMIM database record ID 602908, and in references numbered 74-79 listed hereinbelow.

[0643] Reference is now made to RBBP9 BINDING SITE. retinoblastoma-binding protein 9 (RBBP9) is a host target gene of VGAM19, corresponding to VGAM19-HOST-TARGET GENE of FIG. 19A. RBBP9 BINDING SITE is a host binding site found in the 3′ untranslated region of RBBP9, corresponding to HOST BINDING SITE of FIG. 19A. FIG. 19D illustrates the complementarity of the nucleotide sequence of RBBP9 BINDING SITE, designated SEQ ID:68, to the nucleotide sequence of VGAM19 RNA of FIG. 19A, designated SEQ ID:66.

[0644] Yet another function of VGAM19 is therefore inhibition of retinoblastoma-binding protein 9 (RBBP9), a host gene which encodes a Protein that is a retinoblastoma-binding protein and is associated with cancer, as part of a novel viral mechanism used by Alcelaphine herpesvirus 1 for attacking a host. Accordingly, utilities of VGAM19 include diagnosis, prevention and treatment of viral infection by Alcelaphine herpesvirus 1.

[0645] The function of RBBP9 has been established by previous studies. The retinoblastoma (RB1; 180200) gene is one of the most extensively studied tumor-suppressor genes, in part, perhaps, because it was the first in which the Knudson 2-hit model of tumorigenesis in familial cancer syndromes was established at the molecular level. Deletion or inactivation of both RB alleles is an essential, rate-limiting step in the formation of retinoblastoma and osteosarcoma. RB inactivation is also found in other human tumors, such as breast cancer (Lee et al., 1988), small-cell carcinoma of the lung (Yokota et al., 1988), glioblastoma (Venter et al., 1991), and acute lymphoblastic leukemia (Cheng et al., 1990). Loss of RB function is associated with loss of cellular proliferative control; introduction of a wildtype RB can suppress cell growth and tumorigenicity. Woitach et al. (1998) described a new gene, designated BOG (B5T overexpressed gene), which was shown to be overexpressed in several transformed rat liver epithelial (RLE) cell lines resistant to the growth-inhibitory effect of TGF-beta-1 (TGFB1; 190180), as well as in primary human liver tumors. The Bog protein was found to share homology with other retinoblastoma-binding proteins and contained the RB-binding motif LXCXE. Using the yeast 2-hybrid system and coimmunoprecipitation, Woitach et al. (1998) demonstrated that Bog binds to the RB1 gene product. In vivo, Bog/Rb complexes do not contain E2F1 (189971), and Bog can displace E2F1 from E2F1/Rb complexes in vitro. Overexpression of Bog in normal RLE cells conferred resistance to the growth-inhibitory effect of TGF-beta-1. Furthermore, normal RLE cells were rapidly transformed when Bog was continuously overexpressed and formed hepatoblastoma-like tumors when transplanted into nude mice. These data suggested that Bog may be important in the transformation process, in part due to its capacity to transfer resistance to the growth-inhibitory effects of TGF-beta-1 through interaction with RB and the subsequent displacement of E2F1.

[0646] Full details of the abovementioned studies are described in the following publications, the disclosure of which are hereby incorporated by reference:
[0647] oitach, J. T.; Zhang, M.; Niu, C.-H.; Thorgeirsson, S. S.: A retinoblastoma-binding protein that affects cell-cycle control and confers transforming ability. Nature Genet. 19: 371-374, 1998.

[0648] Further studies establishing the function and utilities of RBBP9 are found in John Hopkins OMIM database record ID 602908, and in references numbered 74-79 listed hereinbelow.

[0649] Reference is now made to RBBP9 BINDING SITE. retinoblastoma-binding protein 9 (RBBP9) is a host target gene of VGAM19, corresponding to VGAM19-HOST-TARGET GENE of FIG. 19A. RBBP9 BINDING SITE is a host binding site found in the 3′ untranslated region of RBBP9, corresponding to HOST BINDING SITE of FIG. 19A. FIG. 19D illustrates the complementarity of the nucleotide sequence of RBBP9 BINDING SITE, designated SEQ ID:68, to the nucleotide sequence of VGAM19 RNA of FIG. 19A, designated SEQ ID:66.

[0650] Yet another function of VGAM19 is therefore inhibition of retinoblastoma-binding protein 9 (RBBP9), a host gene which encodes a Protein that is a retinoblastoma-binding protein and is associated with cancer, as part of a novel viral mechanism used by Alcelaphine herpesvirus 1 for attacking a host. Accordingly, utilities of VGAM19 include diagnosis, prevention and treatment of viral infection by Alcelaphine herpesvirus 1.

[0651] The function of RBBP9 has been established by previous studies. The retinoblastoma (RB1; 180200) gene is one of the most extensively studied tumor-suppressor genes, in part, perhaps, because it was the first in which the Knudson 2-hit model of tumorigenesis in familial cancer syndromes was established at the molecular level. Deletion or inactivation of both RB alleles is an essential, rate-limiting step in the formation of retinoblastoma and osteosarcoma. RB inactivation is also found in other human tumors, such as breast cancer (Lee et al., 1988), small-cell carcinoma of the lung (Yokota et al., 1988), glioblastoma (Venter et al., 1991), and acute lymphoblastic leukemia (Cheng et al., 1990). Loss of RB function is associated with loss of cellular proliferative control; introduction of a wildtype RB can suppress cell growth and tumorigenicity. Woitach et al. (1998) described a new gene, designated BOG (B5T overexpressed gene), which was shown to be overexpressed in several transformed rat liver epithelial (RLE) cell lines resistant to the growth-inhibitory effect of TGF-beta-1 (TGFB1; 190180), as well as in primary human liver tumors. The Bog protein was found to share homology with other retinoblastoma-binding proteins and contained the RB-binding motif LXCXE. Using the yeast 2-hybrid system and coimmunoprecipitation, Woitach et al. (1998) demonstrated that Bog binds to the RB1 gene product. In vivo, Bog/Rb complexes do not contain E2F1 (189971), and Bog can displace E2F1 from E2F1/Rb complexes in vitro. Overexpression of Bog in normal RLE cells conferred resistance to the growth-inhibitory effect of TGF-beta-1. Furthermore, normal RLE cells were rapidly transformed when Bog was continuously overexpressed and formed hepatoblastoma-like tumors when transplanted into nude mice. These data suggested that Bog may be important in the transformation process, in part due to its capacity to transfer resistance to the growth-inhibitory effects of TGF-beta-1 through interaction with RB and the subsequent displacement of E2F1.

[0652] Full details of the abovementioned studies are described in the following publications, the disclosure of which are hereby incorporated by reference:
[0653] oitach, J. T.; Zhang, M.; Niu, C.-H.; Thorgeirsson, S. S.: A retinoblastoma-binding protein that affects cell-cycle control and confers transforming ability. Nature Genet. 19: 371-374, 1998.

[0654] Further studies establishing the function and utilities of RBBP9 are found in John Hopkins OMIM database record ID 602908, and in references numbered 74-79 listed hereinbelow.

[0655] Reference is now made to RBBP9 BINDING SITE. retinoblastoma-binding protein 9 (RBBP9) is a host target gene of VGAM19, corresponding to VGAM19-HOST-TARGET GENE of FIG. 19A. RBBP9 BINDING SITE is a host binding site found in the 3′ untranslated region of RBBP9, corresponding to HOST BINDING SITE of FIG. 19A. FIG. 19D illustrates the complementarity of the nucleotide sequence of RBBP9 BINDING SITE, designated SEQ ID:68, to the nucleotide sequence of VGAM19 RNA of FIG. 19A, designated SEQ ID:66.

[0656] Yet another function of VGAM19 is therefore inhibition of retinoblastoma-binding protein 9 (RBBP9), a host gene which encodes a Protein that is a retinoblastoma-binding protein and is associated with cancer, as part of a novel viral mechanism used by Alcelaphine herpesvirus 1 for attacking a host. Accordingly, utilities of VGAM19 include diagnosis, prevention and treatment of viral infection by Alcelaphine herpesvirus 1.

[0657] The function of RBBP9 has been established by previous studies. The retinoblastoma (RB1; 180200) gene is one of the most extensively studied tumor-suppressor genes, in part, perhaps, because it was the first in which the Knudson 2-hit model of tumorigenesis in familial cancer syndromes was established at the molecular level. Deletion or inactivation of both RB alleles is an essential, rate-limiting step in the formation of retinoblastoma and osteosarcoma. RB inactivation is also found in other human tumors, such as breast cancer (Lee et al., 1988), small-cell carcinoma of the lung (Yokota et al., 1988), glioblastoma (Venter et al., 1991), and acute lymphoblastic leukemia (Cheng et al., 1990). Loss of RB function is associated with loss of cellular proliferative control; introduction of a wildtype RB can suppress cell growth and tumorigenicity. Woitach et al. (1998) described a new gene, designated BOG (B5T overexpressed gene), which was shown to be overexpressed in several transformed rat liver epithelial (RLE) cell lines resistant to the growth-inhibitory effect of TGF-beta-1 (TGFB1; 190180), as well as in primary human liver tumors. The Bog protein was found to share homology with other retinoblastoma-binding proteins and contained the RB-binding motif LXCXE. Using the yeast 2-hybrid system and coimmunoprecipitation, Woitach et al. (1998) demonstrated that Bog binds to the RB1 gene product. In vivo, Bog/Rb complexes do not contain E2F1 (189971), and Bog can displace E2F1 from E2F1/Rb complexes in vitro. Overexpression of Bog in normal RLE cells conferred resistance to the growth-inhibitory effect of TGF-beta-1. Furthermore, normal RLE cells were rapidly transformed when Bog was continuously overexpressed and formed hepatoblastoma-like tumors when transplanted into nude mice. These data suggested that Bog may be important in the transformation process, in part due to its capacity to transfer resistance to the growth-inhibitory effects of TGF-beta-1 through interaction with RB and the subsequent displacement of E2F1.

[0658] Full details of the abovementioned studies are described in the following publications, the disclosure of which are hereby incorporated by reference:
[0659] oitach, J. T.; Zhang, M.; Niu, C.-H.; Thorgeirsson, S. S.: A retinoblastoma-binding protein that affects cell-cycle control and confers transforming ability. Nature Genet. 19: 371-374, 1998.

[0660] Further studies establishing the function and utilities of RBBP9 are found in John Hopkins OMIM database record ID 602908, and in references numbered 74-79 listed hereinbelow.

[0661] Reference is now made to RBBP9 BINDING SITE. retinoblastoma-binding protein 9 (RBBP9) is a host target gene of VGAM19, corresponding to VGAM19-HOST-TARGET GENE of FIG. 19A. RBBP9 BINDING SITE is a host binding site found in the 3′ untranslated region of RBBP9, corresponding to HOST BINDING SITE of FIG. 19A. FIG. 19D illustrates the complementarity of the nucleotide sequence of RBBP9 BINDING SITE, designated SEQ ID:68, to the nucleotide sequence of VGAM19 RNA of FIG. 19A, designated SEQ ID:66.

[0662] Yet another function of VGAM19 is therefore inhibition of retinoblastoma-binding protein 9 (RBBP9), a host gene which encodes a Protein that is a retinoblastoma-binding protein and is associated with cancer, as part of a novel viral mechanism used by Alcelaphine herpesvirus 1 for attacking a host. Accordingly, utilities of VGAM19 include diagnosis, prevention and treatment of viral infection by Alcelaphine herpesvirus 1.

[0663] The function of RBBP9 has been established by previous studies. The retinoblastoma (RB1; 180200) gene is one of the most extensively studied tumor-suppressor genes, in part, perhaps, because it was the first in which the Knudson 2-hit model of tumorigenesis in familial cancer syndromes was established at the molecular level. Deletion or inactivation of both RB alleles is an essential, rate-limiting step in the formation of retinoblastoma and osteosarcoma. RB inactivation is also found in other human tumors, such as breast cancer (Lee et al., 1988), small-cell carcinoma of the lung (Yokota et al., 1988), glioblastoma (Venter et al., 1991), and acute lymphoblastic leukemia (Cheng et al., 1990). Loss of RB function is associated with loss of cellular proliferative control; introduction of a wildtype RB can suppress cell growth and tumorigenicity. Woitach et al. (1998) described a new gene, designated BOG (B5T overexpressed gene), which was shown to be overexpressed in several transformed rat liver epithelial (RLE) cell lines resistant to the growth-inhibitory effect of TGF-beta-1 (TGFB1; 190180), as well as in primary human liver tumors. The Bog protein was found to share homology with other retinoblastoma-binding proteins and contained the RB-binding motif LXCXE. Using the yeast 2-hybrid system and coimmunoprecipitation, Woitach et al. (1998) demonstrated that Bog binds to the RB1 gene product. In vivo, Bog/Rb complexes do not contain E2F1 (189971), and Bog can displace E2F1 from E2F1/Rb complexes in vitro. Overexpression of Bog in normal RLE cells conferred resistance to the growth-inhibitory effect of TGF-beta-1. Furthermore, normal RLE cells were rapidly transformed when Bog was continuously overexpressed and formed hepatoblastoma-like tumors when transplanted into nude mice. These data suggested that Bog may be important in the transformation process, in part due to its capacity to transfer resistance to the growth-inhibitory effects of TGF-beta-1 through interaction with RB and the subsequent displacement of E2F1.

[0664] Full details of the abovementioned studies are described in the following publications, the disclosure of which are hereby incorporated by reference:
[0665] oitach, J. T.; Zhang, M.; Niu, C.-H.; Thorgeirsson, S. S.: A retinoblastoma-binding protein that affects cell-cycle control and confers transforming ability. Nature Genet. 19: 371-374, 1998.

[0666] Further studies establishing the function and utilities of RBBP9 are found in John Hopkins OMIM database record ID 602908, and in references numbered 74-79 listed hereinbelow.

[0667] Reference is now made to RBBP9 BINDING SITE. retinoblastoma-binding protein 9 (RBBP9) is a host target gene of VGAM19, corresponding to VGAM19-HOST-TARGET GENE of FIG. 19A. RBBP9 BINDING SITE is a host binding site found in the 3′ untranslated region of RBBP9, corresponding to HOST BINDING SITE of FIG. 19A. FIG. 19D illustrates the complementarity of the nucleotide sequence of RBBP9 BINDING SITE, designated SEQ ID:68, to the nucleotide sequence of VGAM19 RNA of FIG. 19A, designated SEQ ID:66.

[0668] Yet another function of VGAM19 is therefore inhibition of retinoblastoma-binding protein 9 (RBBP9), a host gene which encodes a Protein that is a retinoblastoma-binding protein and is associated with cancer, as part of a novel viral mechanism used by Alcelaphine herpesvirus 1 for attacking a host. Accordingly, utilities of VGAM19 include diagnosis, prevention and treatment of viral infection by Alcelaphine herpesvirus 1.

[0669] The function of RBBP9 has been established by previous studies. The retinoblastoma (RB1; 180200) gene is one of the most extensively studied tumor-suppressor genes, in part, perhaps, because it was the first in which the Knudson 2-hit model of tumorigenesis in familial cancer syndromes was established at the molecular level. Deletion or inactivation of both RB alleles is an essential, rate-limiting step in the formation of retinoblastoma and osteosarcoma. RB inactivation is also found in other human tumors, such as breast cancer (Lee et al., 1988), small-cell carcinoma of the lung (Yokota et al., 1988), glioblastoma (Venter et al., 1991), and acute lymphoblastic leukemia (Cheng et al., 1990). Loss of RB function is associated with loss of cellular proliferative control; introduction of a wildtype RB can suppress cell growth and tumorigenicity. Woitach et al. (1998) described a new gene, designated BOG (B5T overexpressed gene), which was shown to be overexpressed in several transformed rat liver epithelial (RLE) cell lines resistant to the growth-inhibitory effect of TGF-beta-1 (TGFB1; 190180), as well as in primary human liver tumors. The Bog protein was found to share homology with other retinoblastoma-binding proteins and contained the RB-binding motif LXCXE. Using the yeast 2-hybrid system and coimmunoprecipitation, Woitach et al. (1998) demonstrated that Bog binds to the RB1 gene product. In vivo, Bog/Rb complexes do not contain E2F1 (189971), and Bog can displace E2F1 from E2F1/Rb complexes in vitro. Overexpression of Bog in normal RLE cells conferred resistance to the growth-inhibitory effect of TGF-beta-1. Furthermore, normal RLE cells were rapidly transformed when Bog was continuously overexpressed and formed hepatoblastoma-like tumors when transplanted into nude mice. These data suggested that Bog may be important in the transformation process, in part due to its capacity to transfer resistance to the growth-inhibitory effects of TGF-beta-1 through interaction with RB and the subsequent displacement of E2F1.

[0670] Full details of the abovementioned studies are described in the following publications, the disclosure of which are hereby incorporated by reference:
[0671] oitach, J. T.; Zhang, M.; Niu, C.-H.; Thorgeirsson, S. S.: A retinoblastoma-binding protein that affects cell-cycle control and confers transforming ability. Nature Genet. 19: 371-374, 1998.

[0672] Further studies establishing the function and utilities of RBBP9 are found in John Hopkins OMIM database record ID 602908, and in references numbered 74-79 listed hereinbelow.

[0673] Reference is now made to RBBP9 BINDING SITE. retinoblastoma-binding protein 9 (RBBP9) is a host target gene of VGAM19, corresponding to VGAM19-HOST-TARGET GENE of FIG. 19A. RBBP9 BINDING SITE is a host binding site found in the 3′ untranslated region of RBBP9, corresponding to HOST BINDING SITE of FIG. 19A. FIG. 19D illustrates the complementarity of the nucleotide sequence of RBBP9 BINDING SITE, designated SEQ ID:68, to the nucleotide sequence of VGAM19 RNA of FIG. 19A, designated SEQ ID:66.

[0674] Yet another function of VGAM19 is therefore inhibition of retinoblastoma-binding protein 9 (RBBP9), a host gene which encodes a Protein that is a retinoblastoma-binding protein and is associated with cancer, as part of a novel viral mechanism used by Alcelaphine herpesvirus 1 for attacking a host. Accordingly, utilities of VGAM19 include diagnosis, prevention and treatment of viral infection by Alcelaphine herpesvirus 1.

[0675] The function of RBBP9 has been established by previous studies. The retinoblastoma (RB1; 180200) gene is one of the most extensively studied tumor-suppressor genes, in part, perhaps, because it was the first in which the Knudson 2-hit model of tumorigenesis in familial cancer syndromes was established at the molecular level. Deletion or inactivation of both RB alleles is an essential, rate-limiting step in the formation of retinoblastoma and osteosarcoma. RB inactivation is also found in other human tumors, such as breast cancer (Lee et al., 1988), small-cell carcinoma of the lung (Yokota et al., 1988), glioblastoma (Venter et al., 1991), and acute lymphoblastic leukemia (Cheng et al., 1990). Loss of RB function is associated with loss of cellular proliferative control; introduction of a wildtype RB can suppress cell growth and tumorigenicity. Woitach et al. (1998) described a new gene, designated BOG (B5T overexpressed gene), which was shown to be overexpressed in several transformed rat liver epithelial (RLE) cell lines resistant to the growth-inhibitory effect of TGF-beta-1 (TGFB1; 190180), as well as in primary human liver tumors. The Bog protein was found to share homology with other retinoblastoma-binding proteins and contained the RB-binding motif LXCXE. Using the yeast 2-hybrid system and coimmunoprecipitation, Woitach et al. (1998) demonstrated that Bog binds to the RB1 gene product. In vivo, Bog/Rb complexes do not contain E2F1 (189971), and Bog can displace E2F1 from E2F1/Rb complexes in vitro. Overexpression of Bog in normal RLE cells conferred resistance to the growth-inhibitory effect of TGF-beta-1. Furthermore, normal RLE cells were rapidly transformed when Bog was continuously overexpressed and formed hepatoblastoma-like tumors when transplanted into nude mice. These data suggested that Bog may be important in the transformation process, in part due to its capacity to transfer resistance to the growth-inhibitory effects of TGF-beta-1 through interaction with RB and the subsequent displacement of E2F1.

[0676] Full details of the abovementioned studies are described in the following publications, the disclosure of which are hereby incorporated by reference:
[0677] oitach, J. T.; Zhang, M.; Niu, C.-H.; Thorgeirsson, S. S.: A retinoblastoma-binding protein that affects cell-cycle control and confers transforming ability. Nature Genet. 19: 371-374, 1998.

[0678] Further studies establishing the function and utilities of RBBP9 are found in John Hopkins OMIM database record ID 602908, and in references numbered 74-79 listed hereinbelow.

[0679] Reference is now made to RBBP9 BINDING SITE. retinoblastoma-binding protein 9 (RBBP9) is a host target gene of VGAM19, corresponding to VGAM19-HOST-TARGET GENE of FIG. 19A. RBBP9 BINDING SITE is a host binding site found in the 3′ untranslated region of RBBP9, corresponding to HOST BINDING SITE of FIG. 19A. FIG. 19D illustrates the complementarity of the nucleotide sequence of RBBP9 BINDING SITE, designated SEQ ID:68, to the nucleotide sequence of VGAM19 RNA of FIG. 19A, designated SEQ ID:66.

[0680] Yet another function of VGAM19 is therefore inhibition of retinoblastoma-binding protein 9 (RBBP9), a host gene which encodes a Protein that is a retinoblastoma-binding protein and is associated with cancer, as part of a novel viral mechanism used by Alcelaphine herpesvirus 1 for attacking a host. Accordingly, utilities of VGAM19 include diagnosis, prevention and treatment of viral infection by Alcelaphine herpesvirus 1.

[0681] The function of RBBP9 has been established by previous studies. The retinoblastoma (RB1; 180200) gene is one of the most extensively studied tumor-suppressor genes, in part, perhaps, because it was the first in which the Knudson 2-hit model of tumorigenesis in familial cancer syndromes was established at the molecular level. Deletion or inactivation of both RB alleles is an essential, rate-limiting step in the formation of retinoblastoma and osteosarcoma. RB inactivation is also found in other human tumors, such as breast cancer (Lee et al., 1988), small-cell carcinoma of the lung (Yokota et al., 1988), glioblastoma (Venter et al., 1991), and acute lymphoblastic leukemia (Cheng et al., 1990). Loss of RB function is associated with loss of cellular proliferative control; introduction of a wildtype RB can suppress cell growth and tumorigenicity. Woitach et al. (1998) described a new gene, designated BOG (B5T overexpressed gene), which was shown to be overexpressed in several transformed rat liver epithelial (RLE) cell lines resistant to the growth-inhibitory effect of TGF-beta-1 (TGFB1; 190180), as well as in primary human liver tumors. The Bog protein was found to share homology with other retinoblastoma-binding proteins and contained the RB-binding motif LXCXE. Using the yeast 2-hybrid system and coimmunoprecipitation, Woitach et al. (1998) demonstrated that Bog binds to the RB1 gene product. In vivo, Bog/Rb complexes do not contain E2F1 (189971), and Bog can displace E2F1 from E2F1/Rb complexes in vitro. Overexpression of Bog in normal RLE cells conferred resistance to the growth-inhibitory effect of TGF-beta-1. Furthermore, normal RLE cells were rapidly transformed when Bog was continuously overexpressed and formed hepatoblastoma-like tumors when transplanted into nude mice. These data suggested that Bog may be important in the transformation process, in part due to its capacity to transfer resistance to the growth-inhibitory effects of TGF-beta-1 through interaction with RB and the subsequent displacement of E2F1.

[0682] Full details of the abovementioned studies are described in the following publications, the disclosure of which are hereby incorporated by reference:
[0683] oitach, J. T.; Zhang, M.; Niu, C.-H.; Thorgeirsson, S. S.: A retinoblastoma-binding protein that affects cell-cycle control and confers transforming ability. Nature Genet. 19: 371-374, 1998.

[0684] Further studies establishing the function and utilities of RBBP9 are found in John Hopkins OMIM database record ID 602908, and in references numbered 74-79 listed hereinbelow.

[0685] Reference is now made to FIG. 20A, which is a simplified diagram providing a conceptual explanation of the mode by which a novel bioinformatically detected viral gene, referred to here as Viral Genomic Address Messenger 20 (VGAM20) modulates expression of host target genes thereof, the function and utility of which host target genes is known in the art.

[0686] VGAM20 is a novel bioinformatically detected regulatory, non protein coding, viral micro RNA (miRNA) gene. The method by which VGAM20 was detected is described hereinabove with reference to FIGS. 2-8.

[0687] VGAM20 GENE is a viral gene contained in the genome of Alcelaphine herpesvirus 1. VGAM20-HOST TARGET GENE is a human gene contained in the human genome.

[0688] VGAM20 GENE encodes a VGAM20 PRECURSOR RNA. Similar to other miRNA genes, and unlike most ordinary genes, the RNA transcribed by VGAM20, VGAM20 PRECURSOR RNA, does not encoded a protein.

[0689] VGAM20 PRECURSOR RNA folds onto itself, forming VGAM20 FOLDED PRECURSOR RNA. As FIG. 20 illustrates, VGAM20 FOLDED PRECURSOR RNA forms a ‘hairpin structure’, folding onto itself. As is well known in the art, this ‘hairpin structure’, is typical of RNA encoded by miRNA genes, and is due to the fact that the nucleotide sequence of the first half of the RNA encoded by a miRNA gene is an accurate or partial inversed-reversed sequence of the nucleotide sequence of the second half thereof. By “inversed-reversed” is meant a sequence which is reversed and wherein each nucleotide is replaced by a complimentary nucleotide, as is well known in the art (e.g. ATGGC is the inversed-reversed sequence of GCCAT).

[0690] An enzyme complex designated DICER COMPLEX, ‘dices’ the VGAM20 FOLDED PRECURSOR RNA into a single stranded ˜22 nt long RNA segment, designated VGAM20 RNA. As is known in the art, ‘dicing’ of a hairpin structured RNA precursor product into short a ˜22 nt RNA segment is catalyzed by an enzyme complex comprising an enzyme called Dicer together with other necessary proteins.

[0691] VGAM20-HOST TARGET GENE encodes a corresponding messenger RNA, designated VGAM20-HOST-TARGET RNA. VGAM20-HOST-TARGET RNA comprises three regions, as is typical of mRNA of a protein coding gene: a 5′ untranslated region, a protein coding region and a 3′ untranslated region, designated 5′UTR, PROTEIN CODING and 3′UTR respectively.

[0692] VGAM20 RNA binds complimentarily to a HOST BINDING SITE, located on an untranslated region of VGAM20-HOST-TARGET RNA. This complimentarily binding is due to the fact that the nucleotide sequence of VGAM20 RNA is an accurate or a partial inversed-reversed sequence of the nucleotide sequence of HOST BINDING SITE. It is appreciated that while FIG. 20A depicts the HOST BINDING SITE on the 3′UTR region, this is meant as an example only—the HOST BINDING SITE may be located on the 5′UTR region as well.

[0693] The complimentary binding of VGAM20 RNA to HOST BINDING SITE inhibits translation of VGAM20-HOST-TARGET RNA into VGAM20-HOST-TARGET PROTEIN. VGAM20-HOST-TARGET PROTEIN is therefore outlined by a broken line.

[0694] It is appreciated that VGAM20-HOST-TARGET GENE in fact represents a plurality of host target genes of VGAM20. The mRNA of each of this plurality of host target genes of VGAM20 comprises a HOST BINDING SITE, having a nucleotide sequence which is at least partly complementary to VGAM20 RNA, and which when bound by VGAM20 RNA causes inhibition of translation of one of a plurality of host target proteins of VGAM20. The plurality of host target genes of VGAM20 and their respective host binding sites, are described hereinbelow with reference to FIG. 20D.

[0695] It is appreciated by one skilled in the art that the mode of translational inhibition illustrated by FIG. 20A with specific reference to translational inhibition exerted by VGAM20 on one or more host target genes of VGAM20, is in fact common to other known miRNA genes. As mentioned hereinabove with reference to the background section, although a specific complimentary binding site has been demonstrated only for miRNA genes Lin-4 and Let-7, all other recently discovered miRNA genes are also believed by those skilled in the art to modulate expression of other genes by complimentary binding, although specific complimentary binding sites of these genes have not yet been found (Ruvkun G., ‘Perspective: Glimpses of a tiny RNA world’, Science 294, 779 (2001)).

[0696] It is further appreciated that a function of VGAM20 is inhibition of expression of host target genes, as part of a novel viral mechanism of attacking a host. Accordingly, utilities of VGAM20 include diagnosis, prevention and treatment of viral infection by Alcelaphine herpesvirus 1.

[0697] Reference is now made to FIG. 20B which shows the nucleotide sequence of VGAM20 PRECURSOR RNA of FIG. 20A, designated SEQ ID:79, and a probable nucleotide sequence of VGAM20 RNA of FIG. 20A, designated SEQ ID:80. The nucleotide sequence of SEQ ID:80, which is highly likely (over 35%) to be identical or highly similar to that of VGAM20, is marked by an underline within the sequence of VGAM20 PRECURSOR RNA.

[0698] Reference is now made to FIG. 20C, which shows the secondary folding of VGAM20 PRECURSOR RNA, forming a ‘hairpin structure’ designated VGAM20 FOLDED PRECURSOR RNA, both of FIG. 20A. A probable (>35%) nucleotide sequence of VGAM20 RNA, designated SEQ ID:80 of FIG. 20B, is marked by an underline on VGAM20 FOLDED PRECURSOR RNA. It is appreciated that the complimentary base-paring is not perfect, with ‘bulges’, as is well known in the art with respect to the RNA folding of all known miRNA genes.

[0699] Reference is now made to FIG. 20D, which is a table showing binding sites found in untranslated regions of a plurality of host target genes of VGAM20, each binding site corresponding to HOST BINDING SITE of FIG. 20A, and their complementarity to SEQ ID:80, which is highly likely (>35%) to be identical or highly similar to the nucleotide sequence of VGAM20 RNA of FIG. 20A.

[0700] As mentioned hereinabove with reference to FIG. 20A a function of VGAM20 is inhibition of expression of host target genes, as part of a novel viral mechanism of attacking a host. Accordingly, utilities of VGAM20 include diagnosis, prevention and treatment of viral infection by Alcelaphine herpesvirus 1. It is appreciated that specific functions, and accordingly utilities, of VGAM20 correlate with, and may be deduced from, the identity of the host target genes which VGAM20 binds and inhibits, and the function of these host target genes, as elaborated hereinbelow.

[0701] Reference is now made to FZD7 BINDING SITE. frizzled (Drosophila) homolog 7 (FZD7) is a host target gene of VGAM20, corresponding to VGAM20-HOST-TARGET GENE of FIG. 20A. FZD7 BINDING SITE is a host binding site found in the 3′ untranslated region of FZD7, corresponding to HOST BINDING SITE of FIG. 20A. FIG. 20D illustrates the complementarity of the nucleotide sequence of FZD7 BINDING SITE, designated SEQ ID:81, to the nucleotide sequence of VGAM20 RNA of FIG. 20A, designated SEQ ID:80.

[0702] A function of VGAM20 is therefore inhibition of frizzled (Drosophila) homolog 7 (FZD7), a host gene which encodes a receptor that enhances beta-catenin mediated signaling., as part of a novel viral mechanism used by Alcelaphine herpesvirus 1 for attacking a host. Accordingly, utilities of VGAM20 include diagnosis, prevention and treatment of viral infection by Alcelaphine herpesvirus 1.

[0703] The function of FZD7 has been established by previous studies. Sagara et al. (1998) isolated FZD7 cDNAs from a fetal lung library. They stated that the FZD7 sequence had 20 nucleotide differences compared to that reported for FzE3 by Tanaka et al. (1998), resulting in 9 predicted amino acid substitutions. Sagara et al. (1998) noted that the substituted amino acids are conserved between FZD7 and mouse MHz7. They suggested that the sequence differences between FZD7 and FzE3 resulted from misincorporations during the PCR-based cloning of FzE3. Northern blot analysis revealed that FZD7 is expressed as S— and 4-kb mRNAs in several human tissues, with the highest expression in adult skeletal muscle and fetal kidney. The frizzled-dependent signaling cascade comprises several branches whose differential activation depends on specific Wnt ligands, frizzled receptor isoforms, and the cellular context. In Xenopus embryos, the canonical beta-catenin (116806) pathway contributes to the establishment of the dorsal-ventral axis. A different branch, referred to as the planar cell polarity pathway, is essential for cell polarization during elongation of the axial mesoderm by convergent extension. Winklbauer et al. (2001) demonstrated that a third branch of the cascade is independent of dishevelled (see 601365) function and involves signaling through trimeric G proteins and protein kinase C (PKC, see 176960). During gastrulation, frizzled-7-dependent PKC signaling controls cell-sorting behavior in the mesoderm. Loss of zygotic frizzled-7 function results in the inability of involuted anterior mesoderm to separate from the ectoderm, which leads to severe gastrulation defects. Winklbauer et al. (2001) concluded that their results provide a developmentally relevant in vivo function for the frizzled/PKC pathway in vertebrates.

[0704] Full details of the abovementioned studies are described in the following publications, the disclosure of which are hereby incorporated by reference:
[0705] agara, N.; Toda, G.; Hirai, M.; Terada, M.; Katoh, M.: Molecular cloning, differential expression, and chromosomal localization of human frizzled-1, frizzled-2, and frizzled-7. Biochem. Biophys. Res. Commun. 252: 117-122, 1998. PubMed ID: 9813155 2. Tanaka, S.; Akiyoshi, T.; Mori, M.; Wands, J. R.; Sugimachi, K.: A novel frizzled gene identified in human esophageal carcinoma mediates APC/beta-catenin signals. Proc. Nat. Acad. Sci. 95: 10164-10169, 1998.

[0706] Further studies establishing the function and utilities of FZD7 are found in John Hopkins OMIM database record ID 603410, and in references numbered 80-82 listed hereinbelow.

[0707] Reference is now made to MMP19 BINDING SITE. matrix metalloproteinase 19 (MMP19) is a host target gene of VGAM20, corresponding to VGAM20-HOST-TARGET GENE of FIG. 20A. MMP19 BINDING SITE is a host binding site found in the 5′ untranslated region of MMP19, corresponding to HOST BINDING SITE of FIG. 20A. FIG. 20D illustrates the complementarity of the nucleotide sequence of MMP19 BINDING SITE, designated SEQ ID:82, to the nucleotide sequence of VGAM20 RNA of FIG. 20A, designated SEQ ID:80.

[0708] Yet another function of VGAM20 is therefore inhibition of matrix metalloproteinase 19 (MMP19), a host gene which encodes a Enzyme that degrades various components of the extracellular matrix, such as aggrecan and cartilage oligomeric matrix protein (comp), during development, haemostasis and pathological conditions and is associated with arthritic disease, as part of a novel viral mechanism used by Alcelaphine herpesvirus 1 for attacking a host. Accordingly, utilities of VGAM20 include diagnosis, prevention and treatment of viral infection by Alcelaphine herpesvirus 1.

[0709] The function of MMP19 has been established by previous studies. Pendas et al. (1997) cloned the cDNA for MMP19 from a human liver cDNA library using a combination of homology and direct library screenings. They found that the 508-amino acid protein encoded by this cDNA contains the major structural domains characteristic of MMPs but has a unique insertion and lacks the distinctive structural features of the established MMP subclasses. They therefore proposed that MMP19 represents the first member of a novel MMP subfamily

[0710] Full details of the abovementioned studies are described in the following publications, the disclosure of which are hereby incorporated by reference:
[0711] Pendas, A. M.; Knauper, V.; Puente, X. S.; Llano, E.; Mattei, M.-G.; Apte, S.; Murphy, G.; Lopez-Otin, C.: Identification and characterization of a novel human matrix metalloproteinase with unique structural characteristics, chromosomal location, and tissue distribution. J. Biol. Chem. 272: 4281-4286, 1997.

[0712] Further studies establishing the function and utilities of MMP19 are found in John Hopkins OMIM database record ID 601807, and in references numbered 83-84 listed hereinbelow.

[0713] Reference is now made to MSL3L1 BINDING SITE. male-specific lethal-3 (Drosophila)-like 1 (MSL3L1) is a host target gene of VGAM20, corresponding to VGAM20-HOST-TARGET GENE of FIG. 20A. MSL3L1 BINDING SITE is a host binding site found in the 3′ untranslated region of MSL3L1, corresponding to HOST BINDING SITE of FIG. 20A. FIG. 20D illustrates the complementarity of the nucleotide sequence of MSL3L1 BINDING SITE, designated SEQ ID:83, to the nucleotide sequence of VGAM20 RNA of FIG. 20A, designated SEQ ID:80.

[0714] An additional function of VGAM20 is therefore inhibition of male-specific lethal-3 (Drosophila)-like 1 (MSL3L1), a host gene which encodes a Protein that is essential for elevating transcription of the single x chromosome in the male., as part of a novel viral mechanism used by Alcelaphine herpesvirus 1 for attacking a host. Accordingly, utilities of VGAM20 include diagnosis, prevention and treatment of viral infection by Alcelaphine herpesvirus 1.

[0715] The function of MSL3L1 has been established by previous studies. The Drosophila male-specific lethal (msl) genes regulate transcription from the male X chromosome in a dosage compensation pathway that equalizes X-linked gene expression in males and females. The members of this gene family, including msl1, msl2, msl3, mle, and mof, encode proteins with no sequence similarity to known proteins. However, mutations in each of these genes produce a similar phenotype: sex-specific lethality of male embryos caused by the failure of mutants to increase transcription from the single male X chromosome. The MSL gene products assemble into a multiprotein transcriptional activation complex at hundreds of sites along the chromatin of the X chromosome. By searching sequence databases with the sequence of a BAC clone that maps to Xp22.3, Prakash et al. (1999) identified a human homolog of Drosophila msl3, MSL3-like-1 (MSL3L1). They isolated a cDNA containing a complete MSL3L1 coding sequence. The deduced 521-amino acid MSL3L1 protein shares 30% overall sequence identity with Drosophila MSL3 and 86% identity with mouse Msl311, which the authors also identified. Three segments of the Drosophila MSL3 protein are highly conserved in MSL3L1, including 2 putative chromodomains, 1 at the N terminus and the other at the C terminus. Chromodomains, which form a characteristic tertiary structure and can interact with components of chromatin, have been implicated to play roles in chromatin organization and transcriptional regulation. MSL3L1 also contains a putative nuclear localization signal, a putative leucine zipper motif within the second chromodomain, and 2 potential tyrosine kinase phosphorylation sites. Prakash et al. (1999) identified human fetal kidney cDNAs representing an alternatively spliced MSL3L1 transcript that lacks exon 2. The predicted protein, which the authors referred to as isoform 2, is identical to the first isoform from amino acid 62 to the C terminus but does not contain the first 26 amino acids of the N-terminal chromodomain. Northern blot analysis detected a major 2.4-kb MSL3L1 transcript in all tissues examined, namely liver, pancreas, heart, lung, kidney, skeletal muscle, brain, and placenta, with highest expression in skeletal muscle and heart. A 2.6-kb transcript unique to skeletal muscle was also found. Northern blot analysis of E7, E11, E15, and E17 mouse embryos detected approximately equal levels of Msl311 expression in all embryos. The MSL3L1 gene spans 17 kb and contains 13 exons. It is transcribed from telomere to centromere. Prakash et al. (1999) showed that the MSL3L1 gene undergoes X inactivation.

[0716] Full details of the abovementioned studies are described in the following publications, the disclosure of which are hereby incorporated by reference:
[0717] rakash, S. K.; Van den Veyver, I. B.; Franco, B.; Volta, M.; Ballabio, A.; Zoghbi, H. Y.: Characterization of a novel chromo domain gene in Xp22.3 with homology to Drosophila msl-3. Genomics 59: 77-84, 1999.

[0718] Further studies establishing the function and utilities of MSL3L1 are found in John Hopkins OMIM database record ID 604880, and in references numbered 85 listed hereinbelow.

[0719] Reference is now made to MSL3L1 BINDING SITE. male-specific lethal-3 (Drosophila)-like 1 (MSL3L1) is a host target gene of VGAM20, corresponding to VGAM20-HOST-TARGET GENE of FIG. 20A. MSL3L1 BINDING SITE is a host binding site found in the 3′ untranslated region of MSL3L1, corresponding to HOST BINDING SITE of FIG. 20A. FIG. 20D illustrates the complementarity of the nucleotide sequence of MSL3L1 BINDING SITE, designated SEQ ID:83, to the nucleotide sequence of VGAM20 RNA of FIG. 20A, designated SEQ ID: 80.

[0720] A further function of VGAM20 is therefore inhibition of male-specific lethal-3 (Drosophila)-like 1 (MSL3L1), a host gene which encodes a Protein that is essential for elevating transcription of the single x chromosome in the male., as part of a novel viral mechanism used by Alcelaphine herpesvirus 1 for attacking a host. Accordingly, utilities of VGAM20 include diagnosis, prevention and treatment of viral infection by Alcelaphine herpesvirus 1.

[0721] The function of MSL3L1 has been established by previous studies. The Drosophila male-specific lethal (msl) genes regulate transcription from the male X chromosome in a dosage compensation pathway that equalizes X-linked gene expression in males and females. The members of this gene family, including msl1, msl2, msl3, mle, and mof, encode proteins with no sequence similarity to known proteins. However, mutations in each of these genes produce a similar phenotype: sex-specific lethality of male embryos caused by the failure of mutants to increase transcription from the single male X chromosome. The MSL gene products assemble into a multiprotein transcriptional activation complex at hundreds of sites along the chromatin of the X chromosome. By searching sequence databases with the sequence of a BAC clone that maps to Xp22.3, Prakash et al. (1999) identified a human homolog of Drosophila msl3, MSL3-like-1 (MSL3L1). They isolated a cDNA containing a complete MSL3L1 coding sequence. The deduced 521-amino acid MSL3L1 protein shares 30% overall sequence identity with Drosophila MSL3 and 86% identity with mouse Msl311, which the authors also identified. Three segments of the Drosophila MSL3 protein are highly conserved in MSL3L1, including 2 putative chromodomains, 1 at the N terminus and the other at the C terminus. Chromodomains, which form a characteristic tertiary structure and can interact with components of chromatin, have been implicated to play roles in chromatin organization and transcriptional regulation. MSL3L1 also contains a putative nuclear localization signal, a putative leucine zipper motif within the second chromodomain, and 2 potential tyrosine kinase phosphorylation sites. Prakash et al. (1999) identified human fetal kidney cDNAs representing an alternatively spliced MSL3L1 transcript that lacks exon 2. The predicted protein, which the authors referred to as isoform 2, is identical to the first isoform from amino acid 62 to the C terminus but does not contain the first 26 amino acids of the N-terminal chromodomain. Northern blot analysis detected a major 2.4-kb MSL3L1 transcript in all tissues examined, namely liver, pancreas, heart, lung, kidney, skeletal muscle, brain, and placenta, with highest expression in skeletal muscle and heart. A 2.6-kb transcript unique to skeletal muscle was also found. Northern blot analysis of E7, E11, E15, and E17 mouse embryos detected approximately equal levels of Msl311 expression in all embryos. The MSL3L1 gene spans 17 kb and contains 13 exons. It is transcribed from telomere to centromere. Prakash et al. (1999) showed that the MSL3L1 gene undergoes X inactivation.

[0722] Full details of the abovementioned studies are described in the following publications, the disclosure of which are hereby incorporated by reference:
[0723] rakash, S. K.; Van den Veyver, I. B.; Franco, B.; Volta, M.; Ballabio, A.; Zoghbi, H. Y.: Characterization of a novel chromo domain gene in Xp22.3 with homology to Drosophila msl-3. Genomics 59: 77-84, 1999.

[0724] Further studies establishing the function and utilities of MSL3L1 are found in John Hopkins OMIM database record ID 604880, and in references numbered 85 listed hereinbelow.

[0725] Reference is now made to MSL3L1 BINDING SITE. male-specific lethal-3 (Drosophila)-like 1 (MSL3L1) is a host target gene of VGAM20, corresponding to VGAM20-HOST-TARGET GENE of FIG. 20A. MSL3L1 BINDING SITE is a host binding site found in the 3′ untranslated region of MSL3L1, corresponding to HOST BINDING SITE of FIG. 20A. FIG. 20D illustrates the complementarity of the nucleotide sequence of MSL3L1 BINDING SITE, designated SEQ ID:83, to the nucleotide sequence of VGAM20 RNA of FIG. 20A, designated SEQ ID: 80.

[0726] Yet a further function of VGAM20 is therefore inhibition of male-specific lethal-3 (Drosophila)-like 1 (MSL3L1), a host gene which encodes a Protein that is essential for elevating transcription of the single x chromosome in the male., as part of a novel viral mechanism used by Alcelaphine herpesvirus 1 for attacking a host. Accordingly, utilities of VGAM20 include diagnosis, prevention and treatment of viral infection by Alcelaphine herpesvirus 1.

[0727] The function of MSL3L1 has been established by previous studies. The Drosophila male-specific lethal (msl) genes regulate transcription from the male X chromosome in a dosage compensation pathway that equalizes X-linked gene expression in males and females. The members of this gene family, including msl1, msl2, msl3, mle, and mof, encode proteins with no sequence similarity to known proteins. However, mutations in each of these genes produce a similar phenotype: sex-specific lethality of male embryos caused by the failure of mutants to increase transcription from the single male X chromosome. The MSL gene products assemble into a multiprotein transcriptional activation complex at hundreds of sites along the chromatin of the X chromosome. By searching sequence databases with the sequence of a BAC clone that maps to Xp22.3, Prakash et al. (1999) identified a human homolog of Drosophila msl3, MSL3-like-1 (MSL3L1). They isolated a cDNA containing a complete MSL3L1 coding sequence. The deduced 521-amino acid MSL3L1 protein shares 30% overall sequence identity with Drosophila MSL3 and 86% identity with mouse Msl311, which the authors also identified. Three segments of the Drosophila MSL3 protein are highly conserved in MSL3L1, including 2 putative chromodomains, 1 at the N terminus and the other at the C terminus. Chromodomains, which form a characteristic tertiary structure and can interact with components of chromatin, have been implicated to play roles in chromatin organization and transcriptional regulation. MSL3L1 also contains a putative nuclear localization signal, a putative leucine zipper motif within the second chromodomain, and 2 potential tyrosine kinase phosphorylation sites. Prakash et al. (1999) identified human fetal kidney cDNAs representing an alternatively spliced MSL3L1 transcript that lacks exon 2. The predicted protein, which the authors referred to as isoform 2, is identical to the first isoform from amino acid 62 to the C terminus but does not contain the first 26 amino acids of the N-terminal chromodomain. Northern blot analysis detected a major 2.4-kb MSL3L1 transcript in all tissues examined, namely liver, pancreas, heart, lung, kidney, skeletal muscle, brain, and placenta, with highest expression in skeletal muscle and heart. A 2.6-kb transcript unique to skeletal muscle was also found. Northern blot analysis of E7, E11, E15, and E17 mouse embryos detected approximately equal levels of Msl311 expression in all embryos. The MSL3L1 gene spans 17 kb and contains 13 exons. It is transcribed from telomere to centromere. Prakash et al. (1999) showed that the MSL3L1 gene undergoes X inactivation.

[0728] Full details of the abovementioned studies are described in the following publications, the disclosure of which are hereby incorporated by reference:
[0729] rakash, S. K.; Van den Veyver, I. B.; Franco, B.; Volta, M.; Ballabio, A.; Zoghbi, H. Y.: Characterization of a novel chromo domain gene in Xp22.3 with homology to Drosophila msl-3. Genomics 59: 77-84, 1999.

[0730] Further studies establishing the function and utilities of MSL3L1 are found in John Hopkins OMIM database record ID 604880, and in references numbered 85 listed hereinbelow.

[0731] Reference is now made to RAD51C BINDING SITE. RAD51 (S. cerevisiae) homolog C (RAD51C) is a host target gene of VGAM20, corresponding to VGAM20-HOST-TARGET GENE of FIG. 20A. RAD51C BINDING SITE is a host binding site found in the 3′ untranslated region of RAD51C, corresponding to HOST BINDING SITE of FIG. 20A. FIG. 20D illustrates the complementarity of the nucleotide sequence of RAD51C BINDING SITE, designated SEQ ID:84, to the nucleotide sequence of VGAM20 RNA of FIG. 20A, designated SEQ ID:80.

[0732] Another function of VGAM20 is therefore inhibition of RAD51 (S. cerevisiae) homolog C (RAD51C), a host gene which encodes a Protein that is a member of the RAD51 family of strand-transfer proteins, as part of a novel viral mechanism used by Alcelaphine herpesvirus 1 for attacking a host. Accordingly, utilities of VGAM20 include diagnosis, prevention and treatment of viral infection by Alcelaphine herpesvirus 1.

[0733] The function of RAD51C has been established by previous studies. The RAD51 family of related genes, identified in both yeast and humans, encode strand-transfer proteins thought to be involved in recombinational repair of DNA damage and in meiotic recombination. Several members of the mammalian RAD51 gene family have been identified; see, for example, RAD51A (179617), RAD51B (602948), XRCC3 (600675), and DMC1 (602721). Dosanjh et al. (1998) isolated and characterized a novel member of the RAD51 family, which they designated RAD51C. The authors identified several clones with amino acid similarity to the human XRCC3 and yeast Rad51 proteins by screening an EST database. They then isolated a full-length RAD51C cDNA from a human leukocyte cDNA library. The RAD51C cDNA encodes a predicted 376-amino acid protein that has 18 to 26% amino acid identity with other members of the human RAD51 family. By Northern blot analysis, Dosanjh et al. (1998) showed that RAD51C is expressed as an approximately 1.3-kb mRNA in a variety of human tissues, with highest expression in testis, heart muscle, spleen and prostate. Using a yeast 2-hybrid system, they demonstrated that the RAD51C protein interacts strongly with RAD51B and moderately with XRCC3, but not with itself.

[0734] Full details of the abovementioned studies are described in the following publications, the disclosure of which are hereby incorporated by reference:
[0735] osanjh, M. K.; Collins, D. W.; Fan, W.; Lennon, G. G.; Albala, J. S.; Shen, Z.; Schild, D.: Isolation and characterization of RAD51C, a new human member of the RAD51 family of related genes. Nucleic Acids Res. 26: 1179-1184, 1998. PubMed ID: 9469824 2. Masson, J.-Y.; Stasiak, A. Z.; Stasiak, A.; Benson, F. E.; West, S. C.: Complex formation by the human RAD51C and XRCC3 recombination repair proteins. Proc. Nat. Acad. Sci. 98: 8440-8446, 2001.

[0736] Further studies establishing the function and utilities of RAD51C are found in John Hopkins OMIM database record ID 602774, and in references numbered 86-87 listed hereinbelow.

[0737] Reference is now made to RAD51C BINDING SITE. RAD51 (S. cerevisiae) homolog C (RAD51C) is a host target gene of VGAM20, corresponding to VGAM20-HOST-TARGET GENE of FIG. 20A. RAD51C BINDING SITE is a host binding site found in the 3′ untranslated region of RAD51C, corresponding to HOST BINDING SITE of FIG. 20A. FIG. 20D illustrates the complementarity of the nucleotide sequence of RAD51C BINDING SITE, designated SEQ ID:84, to the nucleotide sequence of VGAM20 RNA of FIG. 20A, designated SEQ ID:80.

[0738] Yet another function of VGAM20 is therefore inhibition of RAD51 (S. cerevisiae) homolog C (RAD51C), a host gene which encodes a Protein that is a member of the RAD51 family of strand-transfer proteins, as part of a novel viral mechanism used by Alcelaphine herpesvirus 1 for attacking a host. Accordingly, utilities of VGAM20 include diagnosis, prevention and treatment of viral infection by Alcelaphine herpesvirus 1. The function of RAD51C has been established by previous studies. The RAD51 family of related genes, identified in both yeast and humans, encode strand-transfer proteins thought to be involved in recombinational repair of DNA damage and in meiotic recombination. Several members of the mammalian RAD51 gene family have been identified; see, for example, RAD51A (179617), RAD51B (602948), XRCC3 (600675), and DMC1 (602721). Dosanjh et al. (1998) isolated and characterized a novel member of the RAD51 family, which they designated RAD51C. The authors identified several clones with amino acid similarity to the human XRCC3 and yeast Rad51 proteins by screening an EST database. They then isolated a full-length RAD51C cDNA from a human leukocyte cDNA library. The RAD51C cDNA encodes a predicted 376-amino acid protein that has 18 to 26% amino acid identity with other members of the human RAD51 family. By Northern blot analysis, Dosanjh et al. (1998) showed that RAD51C is expressed as an approximately 1.3-kb mRNA in a variety of human tissues, with highest expression in testis, heart muscle, spleen and prostate. Using a yeast 2-hybrid system, they demonstrated that the RAD51C protein interacts strongly with RAD51B and moderately with XRCC3, but not with itself.

[0739] Full details of the abovementioned studies are described in the following publications, the disclosure of which are hereby incorporated by reference:
[0740] osanjh, M. K.; Collins, D. W.; Fan, W.; Lennon, G. G.; Albala, J. S.; Shen, Z.; Schild, D.: Isolation and characterization of RAD51C, a new human member of the RAD51 family of related genes. Nucleic Acids Res. 26: 1179-1184, 1998. PubMed ID: 9469824 2. Masson, J.-Y.; Stasiak, A. Z.; Stasiak, A.; Benson, F. E.; West, S. C.: Complex formation by the human RAD51C and XRCC3 recombination repair proteins. Proc. Nat. Acad. Sci. 98: 8440-8446, 2001.

[0741] Further studies establishing the function and utilities of RAD51C are found in John Hopkins OMIM database record ID 602774, and in references numbered 86-87 listed hereinbelow.

[0742] Reference is now made to RAD51C BINDING SITE. RAD51 (S. cerevisiae) homolog C (RAD51C) is a host target gene of VGAM20, corresponding to VGAM20-HOST-TARGET GENE of FIG. 20A. RAD51C BINDING SITE is a host binding site found in the 3′ untranslated region of RAD51C, corresponding to HOST BINDING SITE of FIG. 20A. FIG. 20D illustrates the complementarity of the nucleotide sequence of RAD51C BINDING SITE, designated SEQ ID:84, to the nucleotide sequence of VGAM20 RNA of FIG. 20A, designated SEQ ID:80.

[0743] Yet another function of VGAM20 is therefore inhibition of RAD51 (S. cerevisiae) homolog C (RAD51C), a host gene which encodes a Protein that is a member of the RAD51 family of strand-transfer proteins, as part of a novel viral mechanism used by Alcelaphine herpesvirus 1 for attacking a host. Accordingly, utilities of VGAM20 include diagnosis, prevention and treatment of viral infection by Alcelaphine herpesvirus 1.

[0744] The function of RAD51C has been established by previous studies. The RAD51 family of related genes, identified in both yeast and humans, encode strand-transfer proteins thought to be involved in recombinational repair of DNA damage and in meiotic recombination. Several members of the mammalian RAD51 gene family have been identified; see, for example, RAD51A (179617), RAD51B (602948), XRCC3 (600675), and DMC1 (602721). Dosanjh et al. (1998) isolated and characterized a novel member of the RAD51 family, which they designated RAD51C. The authors identified several clones with amino acid similarity to the human XRCC3 and yeast Rad51 proteins by screening an EST database. They then isolated a full-length RAD51C cDNA from a human leukocyte cDNA library. The RAD51C cDNA encodes a predicted 376-amino acid protein that has 18 to 26% amino acid identity with other members of the human RAD51 family. By Northern blot analysis, Dosanjh et al. (1998) showed that RAD51C is expressed as an approximately 1.3-kb mRNA in a variety of human tissues, with highest expression in testis, heart muscle, spleen and prostate. Using a yeast 2-hybrid system, they demonstrated that the RAD51C protein interacts strongly with RAD51B and moderately with XRCC3, but not with itself.

[0745] Full details of the abovementioned studies are described in the following publications, the disclosure of which are hereby incorporated by reference:
[0746] osanjh, M. K.; Collins, D. W.; Fan, W.; Lennon, G. G.; Albala, J. S.; Shen, Z.; Schild, D.: Isolation and characterization of RAD51C, a new human member of the RAD51 family of related genes. Nucleic Acids Res. 26: 1179-1184, 1998. PubMed ID: 9469824 2. Masson, J.-Y.; Stasiak, A. Z.; Stasiak, A.; Benson, F. E.; West, S. C.: Complex formation by the human RAD51C and XRCC3 recombination repair proteins. Proc. Nat. Acad. Sci. 98: 8440-8446, 2001.

[0747] Further studies establishing the function and utilities of RAD51C are found in John Hopkins OMIM database record ID 602774, and in references numbered 86-87 listed hereinbelow.

[0748] Reference is now made to RAD51C BINDING SITE. RAD51 (S. cerevisiae) homolog C (RAD51C) is a host target gene of VGAM20, corresponding to VGAM20-HOST-TARGET GENE of FIG. 20A. RAD51C BINDING SITE is a host binding site found in the 3′ untranslated region of RAD51C, corresponding to HOST BINDING SITE of FIG. 20A. FIG. 20D illustrates the complementarity of the nucleotide sequence of RAD51C BINDING SITE, designated SEQ ID:84, to the nucleotide sequence of VGAM20 RNA of FIG. 20A, designated SEQ ID:80.

[0749] Yet another function of VGAM20 is therefore inhibition of RAD51 (S. cerevisiae) homolog C (RAD51C), a host gene which encodes a Protein that is a member of the RAD51 family of strand-transfer proteins, as part of a novel viral mechanism used by Alcelaphine herpesvirus 1 for attacking a host. Accordingly, utilities of VGAM20 include diagnosis, prevention and treatment of viral infection by Alcelaphine herpesvirus 1.

[0750] The function of RAD51C has been established by previous studies. The RAD51 family of related genes, identified in both yeast and humans, encode strand-transfer proteins thought to be involved in recombinational repair of DNA damage and in meiotic recombination. Several members of the mammalian RAD51 gene family have been identified; see, for example, RAD51A (179617), RAD51B (602948), XRCC3 (600675), and DMC1 (602721). Dosanjh et al. (1998) isolated and characterized a novel member of the RAD51 family, which they designated RAD51C. The authors identified several clones with amino acid similarity to the human XRCC3 and yeast Rad51 proteins by screening an EST database. They then isolated a full-length RAD51C cDNA from a human leukocyte cDNA library. The RAD51C cDNA encodes a predicted 376-amino acid protein that has 18 to 26% amino acid identity with other members of the human RAD51 family. By Northern blot analysis, Dosanjh et al. (1998) showed that RAD51C is expressed as an approximately 1.3-kb mRNA in a variety of human tissues, with highest expression in testis, heart muscle, spleen and prostate. Using a yeast 2-hybrid system, they demonstrated that the RAD51C protein interacts strongly with RAD51B and moderately with XRCC3, but not with itself.

[0751] Full details of the abovementioned studies are described in the following publications, the disclosure of which are hereby incorporated by reference:
[0752] osanjh, M. K.; Collins, D. W.; Fan, W.; Lennon, G. G.; Albala, J. S.; Shen, Z.; Schild, D.: Isolation and characterization of RAD51C, a new human member of the RAD51 family of related genes. Nucleic Acids Res. 26: 1179-1184, 1998. PubMed ID: 9469824 2. Masson, J.-Y.; Stasiak, A. Z.; Stasiak, A.; Benson, F. E.; West, S. C.: Complex formation by the human RAD51C and XRCC3 recombination repair proteins. Proc. Nat. Acad. Sci. 98: 8440-8446, 2001.

[0753] Further studies establishing the function and utilities of RAD51C are found in John Hopkins OMIM database record ID 602774, and in references numbered 86-87 listed hereinbelow.

[0754] Reference is now made to RAD51C BINDING SITE. RAD51 (S. cerevisiae) homolog C (RAD51C) is a host target gene of VGAM20, corresponding to VGAM20-HOST-TARGET GENE of FIG. 20A. RAD51C BINDING SITE is a host binding site found in the 3′ untranslated region of RAD51C, corresponding to HOST BINDING SITE of FIG. 20A. FIG. 20D illustrates the complementarity of the nucleotide sequence of RAD51C BINDING SITE, designated SEQ ID:84, to the nucleotide sequence of VGAM20 RNA of FIG. 20A, designated SEQ ID:80.

[0755] Yet another function of VGAM20 is therefore inhibition of RAD51 (S. cerevisiae) homolog C (RAD51C), a host gene which encodes a Protein that is a member of the RAD51 family of strand-transfer proteins, as part of a novel viral mechanism used by Alcelaphine herpesvirus 1 for attacking a host. Accordingly, utilities of VGAM20 include diagnosis, prevention and treatment of viral infection by Alcelaphine herpesvirus 1.

[0756] The function of RAD51C has been established by previous studies. The RAD51 family of related genes, identified in both yeast and humans, encode strand-transfer proteins thought to be involved in recombinational repair of DNA damage and in meiotic recombination. Several members of the mammalian RAD51 gene family have been identified; see, for example, RAD51A (179617), RAD51B (602948), XRCC3 (600675), and DMC1 (602721). Dosanjh et al. (1998) isolated and characterized a novel member of the RAD51 family, which they designated RAD51C. The authors identified several clones with amino acid similarity to the human XRCC3 and yeast Rad51 proteins by screening an EST database. They then isolated a full-length RAD51C cDNA from a human leukocyte cDNA library. The RAD51C cDNA encodes a predicted 376-amino acid protein that has 18 to 26% amino acid identity with other members of the human RAD51 family. By Northern blot analysis, Dosanjh et al. (1998) showed that RAD51C is expressed as an approximately 1.3-kb mRNA in a variety of human tissues, with highest expression in testis, heart muscle, spleen and prostate. Using a yeast 2-hybrid system, they demonstrated that the RAD51C protein interacts strongly with RAD51B and moderately with XRCC3, but not with itself.

[0757] Full details of the abovementioned studies are described in the following publications, the disclosure of which are hereby incorporated by reference:
[0758] osanjh, M. K.; Collins, D. W.; Fan, W.; Lennon, G. G.; Albala, J. S.; Shen, Z.; Schild, D.: Isolation and characterization of RAD51C, a new human member of the RAD51 family of related genes. Nucleic Acids Res. 26: 1179-1184, 1998. PubMed ID: 9469824 2. Masson, J.-Y.; Stasiak, A. Z.; Stasiak, A.; Benson, F. E.; West, S. C.: Complex formation by the human RAD51C and XRCC3 recombination repair proteins. Proc. Nat. Acad. Sci. 98: 8440-8446, 2001.

[0759] Further studies establishing the function and utilities of RAD51C are found in John Hopkins OMIM database record ID 602774, and in references numbered 86-87 listed hereinbelow.

[0760] Reference is now made to RAD51C BINDING SITE. RAD51 (S. cerevisiae) homolog C (RAD51C) is a host target gene of VGAM20, corresponding to VGAM20-HOST-TARGET GENE of FIG. 20A. RAD51C BINDING SITE is a host binding site found in the 3′ untranslated region of RAD51C, corresponding to HOST BINDING SITE of FIG. 20A. FIG. 20D illustrates the complementarity of the nucleotide sequence of RAD51C BINDING SITE, designated SEQ ID:84, to the nucleotide sequence of VGAM20 RNA of FIG. 20A, designated SEQ ID:80.

[0761] Yet another function of VGAM20 is therefore inhibition of RAD51 (S. cerevisiae) homolog C (RAD51C), a host gene which encodes a Protein that is a member of the RAD51 family of strand-transfer proteins, as part of a novel viral mechanism used by Alcelaphine herpesvirus 1 for attacking a host. Accordingly, utilities of VGAM20 include diagnosis, prevention and treatment of viral infection by Alcelaphine herpesvirus 1.

[0762] The function of RAD51C has been established by previous studies. The RAD51 family of related genes, identified in both yeast and humans, encode strand-transfer proteins thought to be involved in recombinational repair of DNA damage and in meiotic recombination. Several members of the mammalian RAD51 gene family have been identified; see, for example, RAD51A (179617), RAD51B (602948), XRCC3 (600675), and DMC1 (602721). Dosanjh et al. (1998) isolated and characterized a novel member of the RAD51 family, which they designated RAD51C. The authors identified several clones with amino acid similarity to the human XRCC3 and yeast Rad51 proteins by screening an EST database. They then isolated a full-length RAD51C cDNA from a human leukocyte cDNA library. The RAD51C cDNA encodes a predicted 376-amino acid protein that has 18 to 26% amino acid identity with other members of the human RAD51 family. By Northern blot analysis, Dosanjh et al. (1998) showed that RAD51C is expressed as an approximately 1.3-kb mRNA in a variety of human tissues, with highest expression in testis, heart muscle, spleen and prostate. Using a yeast 2-hybrid system, they demonstrated that the RAD51C protein interacts strongly with RAD51B and moderately with XRCC3, but not with itself.

[0763] Full details of the abovementioned studies are described in the following publications, the disclosure of which are hereby incorporated by reference:
[0764] osanjh, M. K.; Collins, D. W.; Fan, W.; Lennon, G. G.; Albala, J. S.; Shen, Z.; Schild, D.: Isolation and characterization of RAD51C, a new human member of the RAD51 family of related genes. Nucleic Acids Res. 26: 1179-1184, 1998. PubMed ID: 9469824 2. Masson, J.-Y.; Stasiak, A. Z.; Stasiak, A.; Benson, F. E.; West, S. C.: Complex formation by the human RAD51C and XRCC3 recombination repair proteins. Proc. Nat. Acad. Sci. 98: 8440-8446, 2001.

[0765] Further studies establishing the function and utilities of RAD51C are found in John Hopkins OMIM database record ID 602774, and in references numbered 86-87 listed hereinbelow.

[0766] Reference is now made to RAD51C BINDING SITE. RAD51 (S. cerevisiae) homolog C (RAD51C) is a host target gene of VGAM20, corresponding to VGAM20-HOST-TARGET GENE of FIG. 20A. RAD51C BINDING SITE is a host binding site found in the 3′ untranslated region of RAD51C, corresponding to HOST BINDING SITE of FIG. 20A. FIG. 20D illustrates the complementarity of the nucleotide sequence of RAD51C BINDING SITE, designated SEQ ID:84, to the nucleotide sequence of VGAM20 RNA of FIG. 20A, designated SEQ ID:80.

[0767] Yet another function of VGAM20 is therefore inhibition of RAD51 (S. cerevisiae) homolog C (RAD51C), a host gene which encodes a Protein that is a member of the RAD51 family of strand-transfer proteins, as part of a novel viral mechanism used by Alcelaphine herpesvirus 1 for attacking a host. Accordingly, utilities of VGAM20 include diagnosis, prevention and treatment of viral infection by Alcelaphine herpesvirus 1.

[0768] The function of RAD51C has been established by previous studies. The RAD51 family of related genes, identified in both yeast and humans, encode strand-transfer proteins thought to be involved in recombinational repair of DNA damage and in meiotic recombination. Several members of the mammalian RAD51 gene family have been identified; see, for example, RAD51A (179617), RAD51B (602948), XRCC3 (600675), and DMC1 (602721). Dosanjh et al. (1998) isolated and characterized a novel member of the RAD51 family, which they designated RAD51C. The authors identified several clones with amino acid similarity to the human XRCC3 and yeast Rad51 proteins by screening an EST database. They then isolated a full-length RAD51C cDNA from a human leukocyte cDNA library. The RAD51C cDNA encodes a predicted 376-amino acid protein that has 18 to 26% amino acid identity with other members of the human RAD51 family. By Northern blot analysis, Dosanjh et al. (1998) showed that RAD51C is expressed as an approximately 1.3-kb mRNA in a variety of human tissues, with highest expression in testis, heart muscle, spleen and prostate. Using a yeast 2-hybrid system, they demonstrated that the RAD51C protein interacts strongly with RAD51B and moderately with XRCC3, but not with itself.

[0769] Full details of the abovementioned studies are described in the following publications, the disclosure of which are hereby incorporated by reference:
[0770] osanjh, M. K.; Collins, D. W.; Fan, W.; Lennon, G. G.; Albala, J. S.; Shen, Z.; Schild, D.: Isolation and characterization of RAD51C, a new human member of the RAD51 family of related genes. Nucleic Acids Res. 26: 1179-1184, 1998. PubMed ID: 9469824 2. Masson, J.-Y.; Stasiak, A. Z.; Stasiak, A.; Benson, F. E.; West, S. C.: Complex formation by the human RAD51C and XRCC3 recombination repair proteins. Proc. Nat. Acad. Sci. 98: 8440-8446, 2001.

[0771] Further studies establishing the function and utilities of RAD51C are found in John Hopkins OMIM database record ID 602774, and in references numbered 86-87 listed hereinbelow.

[0772] Reference is now made to RAD51C BINDING SITE. RAD51 (S. cerevisiae) homolog C (RAD51C) is a host target gene of VGAM20, corresponding to VGAM20-HOST-TARGET GENE of FIG. 20A. RAD51C BINDING SITE is a host binding site found in the 3′ untranslated region of RAD51C, corresponding to HOST BINDING SITE of FIG. 20A. FIG. 20D illustrates the complementarity of the nucleotide sequence of RAD51C BINDING SITE, designated SEQ ID:84, to the nucleotide sequence of VGAM20 RNA of FIG. 20A, designated SEQ ID:80.

[0773] Yet another function of VGAM20 is therefore inhibition of RAD51 (S. cerevisiae) homolog C (RAD51C), a host gene which encodes a Protein that is a member of the RAD51 family of strand-transfer proteins, as part of a novel viral mechanism used by Alcelaphine herpesvirus 1 for attacking a host. Accordingly, utilities of VGAM20 include diagnosis, prevention and treatment of viral infection by Alcelaphine herpesvirus 1.

[0774] The function of RAD51C has been established by previous studies. The RAD51 family of related genes, identified in both yeast and humans, encode strand-transfer proteins thought to be involved in recombinational repair of DNA damage and in meiotic recombination. Several members of the mammalian RAD51 gene family have been identified; see, for example, RAD51A (179617), RAD51B (602948), XRCC3 (600675), and DMC1 (602721). Dosanjh et al. (1998) isolated and characterized a novel member of the RAD51 family, which they designated RAD51C. The authors identified several clones with amino acid similarity to the human XRCC3 and yeast Rad51 proteins by screening an EST database. They then isolated a full-length RAD51C cDNA from a human leukocyte cDNA library. The RAD51C cDNA encodes a predicted 376-amino acid protein that has 18 to 26% amino acid identity with other members of the human RAD51 family. By Northern blot analysis, Dosanjh et al. (1998) showed that RAD51C is expressed as an approximately 1.3-kb mRNA in a variety of human tissues, with highest expression in testis, heart muscle, spleen and prostate. Using a yeast 2-hybrid system, they demonstrated that the RAD51C protein interacts strongly with RAD51B and moderately with XRCC3, but not with itself.

[0775] Full details of the abovementioned studies are described in the following publications, the disclosure of which are hereby incorporated by reference:
[0776] osanjh, M. K.; Collins, D. W.; Fan, W.; Lennon, G. G.; Albala, J. S.; Shen, Z.; Schild, D.: Isolation and characterization of RAD51C, a new human member of the RAD51 family of related genes. Nucleic Acids Res. 26: 1179-1184, 1998. PubMed ID: 9469824 2. Masson, J.-Y.; Stasiak, A. Z.; Stasiak, A.; Benson, F. E.; West, S. C.: Complex formation by the human RAD51C and XRCC3 recombination repair proteins. Proc. Nat. Acad. Sci. 98: 8440-8446, 2001.

[0777] Further studies establishing the function and utilities of RAD51C are found in John Hopkins OMIM database record ID 602774, and in references numbered 86-87 listed hereinbelow.

[0778] Reference is now made to RAD51C BINDING SITE. RAD51 (S. cerevisiae) homolog C (RAD51C) is a host target gene of VGAM20, corresponding to VGAM20-HOST-TARGET GENE of FIG. 20A. RAD51C BINDING SITE is a host binding site found in the 3′ untranslated region of RAD51C, corresponding to HOST BINDING SITE of FIG. 20A. FIG. 20D illustrates the complementarity of the nucleotide sequence of RAD51C BINDING SITE, designated SEQ ID:84, to the nucleotide sequence of VGAM20 RNA of FIG. 20A, designated SEQ ID:80.

[0779] Yet another function of VGAM20 is therefore inhibition of RAD51 (S. cerevisiae) homolog C (RAD51C), a host gene which encodes a Protein that is a member of the RAD51 family of strand-transfer proteins, as part of a novel viral mechanism used by Alcelaphine herpesvirus 1 for attacking a host. Accordingly, utilities of VGAM20 include diagnosis, prevention and treatment of viral infection by Alcelaphine herpesvirus 1.

[0780] The function of RAD51C has been established by previous studies. The RAD51 family of related genes, identified in both yeast and humans, encode strand-transfer proteins thought to be involved in recombinational repair of DNA damage and in meiotic recombination. Several members of the mammalian RAD51 gene family have been identified; see, for example, RAD51A (179617), RAD51B (602948), XRCC3 (600675), and DMC1 (602721). Dosanjh et al. (1998) isolated and characterized a novel member of the RAD51 family, which they designated RAD51C. The authors identified several clones with amino acid similarity to the human XRCC3 and yeast Rad51 proteins by screening an EST database. They then isolated a full-length RAD51C cDNA from a human leukocyte cDNA library. The RAD51C cDNA encodes a predicted 376-amino acid protein that has 18 to 26% amino acid identity with other members of the human RAD51 family. By Northern blot analysis, Dosanjh et al. (1998) showed that RAD51C is expressed as an approximately 1.3-kb mRNA in a variety of human tissues, with highest expression in testis, heart muscle, spleen and prostate. Using a yeast 2-hybrid system, they demonstrated that the RAD51C protein interacts strongly with RAD51B and moderately with XRCC3, but not with itself.

[0781] Full details of the abovementioned studies are described in the following publications, the disclosure of which are hereby incorporated by reference:
[0782] osanjh, M. K.; Collins, D. W.; Fan, W.; Lennon, G. G.; Albala, J. S.; Shen, Z.; Schild, D.: Isolation and characterization of RAD51C, a new human member of the RAD51 family of related genes. Nucleic Acids Res. 26: 1179-1184, 1998. PubMed ID: 9469824 2. Masson, J.-Y.; Stasiak, A. Z.; Stasiak, A.; Benson, F. E.; West, S. C.: Complex formation by the human RAD51C and XRCC3 recombination repair proteins. Proc. Nat. Acad. Sci. 98: 8440-8446, 2001.

[0783] Further studies establishing the function and utilities of RAD51C are found in John Hopkins OMIM database record ID 602774, and in references numbered 86-87 listed hereinbelow.

[0784] Reference is now made to RAD51C BINDING SITE. RAD51 (S. cerevisiae) homolog C (RAD51C) is a host target gene of VGAM20, corresponding to VGAM20-HOST-TARGET GENE of FIG. 20A. RAD51C BINDING SITE is a host binding site found in the 3′ untranslated region of RAD51C, corresponding to HOST BINDING SITE of FIG. 20A. FIG. 20D illustrates the complementarity of the nucleotide sequence of RAD51C BINDING SITE, designated SEQ ID:84, to the nucleotide sequence of VGAM20 RNA of FIG. 20A, designated SEQ ID:80.

[0785] Yet another function of VGAM20 is therefore inhibition of RAD51 (S. cerevisiae) homolog C (RAD51C), a host gene which encodes a Protein that is a member of the RAD51 family of strand-transfer proteins, as part of a novel viral mechanism used by Alcelaphine herpesvirus 1 for attacking a host. Accordingly, utilities of VGAM20 include diagnosis, prevention and treatment of viral infection by Alcelaphine herpesvirus 1.

[0786] The function of RAD51C has been established by previous studies. The RAD51 family of related genes, identified in both yeast and humans, encode strand-transfer proteins thought to be involved in recombinational repair of DNA damage and in meiotic recombination. Several members of the mammalian RAD51 gene family have been identified; see, for example, RAD51A (179617), RAD51B (602948), XRCC3 (600675), and DMC1 (602721). Dosanjh et al. (1998) isolated and characterized a novel member of the RAD51 family, which they designated RAD51C. The authors identified several clones with amino acid similarity to the human XRCC3 and yeast Rad51 proteins by screening an EST database. They then isolated a full-length RAD51C cDNA from a human leukocyte cDNA library. The RAD51C cDNA encodes a predicted 376-amino acid protein that has 18 to 26% amino acid identity with other members of the human RAD51 family. By Northern blot analysis, Dosanjh et al. (1998) showed that RAD51C is expressed as an approximately 1.3-kb mRNA in a variety of human tissues, with highest expression in testis, heart muscle, spleen and prostate. Using a yeast 2-hybrid system, they demonstrated that the RAD51C protein interacts strongly with RAD51B and moderately with XRCC3, but not with itself.

[0787] Full details of the abovementioned studies are described in the following publications, the disclosure of which are hereby incorporated by reference:
[0788] osanjh, M. K.; Collins, D. W.; Fan, W.; Lennon, G. G.; Albala, J. S.; Shen, Z.; Schild, D.: Isolation and characterization of RAD51C, a new human member of the RAD51 family of related genes. Nucleic Acids Res. 26: 1179-1184, 1998. PubMed ID: 9469824 2. Masson, J.-Y.; Stasiak, A. Z.; Stasiak, A.; Benson, F. E.; West, S. C.: Complex formation by the human RAD51C and XRCC3 recombination repair proteins. Proc. Nat. Acad. Sci. 98: 8440-8446, 2001.

[0789] Further studies establishing the function and utilities of RAD51C are found in John Hopkins OMIM database record ID 602774, and in references numbered 86-87 listed hereinbelow.

[0790] Reference is now made to RAD51C BINDING SITE. RAD51 (S. cerevisiae) homolog C (RAD51C) is a host target gene of VGAM20, corresponding to VGAM20-HOST-TARGET GENE of FIG. 20A. RAD51C BINDING SITE is a host binding site found in the 3′ untranslated region of RAD51C, corresponding to HOST BINDING SITE of FIG. 20A. FIG. 20D illustrates the complementarity of the nucleotide sequence of RAD51C BINDING SITE, designated SEQ ID:84, to the nucleotide sequence of VGAM20 RNA of FIG. 20A, designated SEQ ID:80.

[0791] Yet another function of VGAM20 is therefore inhibition of RAD51 (S. cerevisiae) homolog C (RAD51C), a host gene which encodes a Protein that is a member of the RAD51 family of strand-transfer proteins, as part of a novel viral mechanism used by Alcelaphine herpesvirus 1 for attacking a host. Accordingly, utilities of VGAM20 include diagnosis, prevention and treatment of viral infection by Alcelaphine herpesvirus 1.

[0792] The function of RAD51C has been established by previous studies. The RAD51 family of related genes, identified in both yeast and humans, encode strand-transfer proteins thought to be involved in recombinational repair of DNA damage and in meiotic recombination. Several members of the mammalian RAD51 gene family have been identified; see, for example, RAD51A (179617), RAD51B (602948), XRCC3 (600675), and DMC1 (602721). Dosanjh et al. (1998) isolated and characterized a novel member of the RAD51 family, which they designated RAD51C. The authors identified several clones with amino acid similarity to the human XRCC3 and yeast Rad51 proteins by screening an EST database. They then isolated a full-length RAD51C cDNA from a human leukocyte cDNA library. The RAD51C cDNA encodes a predicted 376-amino acid protein that has 18 to 26% amino acid identity with other members of the human RAD51 family. By Northern blot analysis, Dosanjh et al. (1998) showed that RAD51C is expressed as an approximately 1.3-kb mRNA in a variety of human tissues, with highest expression in testis, heart muscle, spleen and prostate. Using a yeast 2-hybrid system, they demonstrated that the RAD51C protein interacts strongly with RAD51B and moderately with XRCC3, but not with itself.

[0793] Full details of the abovementioned studies are described in the following publications, the disclosure of which are hereby incorporated by reference:
[0794] osanjh, M. K.; Collins, D. W.; Fan, W.; Lennon, G. G.; Albala, J. S.; Shen, Z.; Schild, D.: Isolation and characterization of RAD51C, a new human member of the RAD51 family of related genes. Nucleic Acids Res. 26: 1179-1184, 1998. PubMed ID: 9469824 2. Masson, J.-Y.; Stasiak, A. Z.; Stasiak, A.; Benson, F. E.; West, S. C.: Complex formation by the human RAD51C and XRCC3 recombination repair proteins. Proc. Nat. Acad. Sci. 98: 8440-8446, 2001.

[0795] Further studies establishing the function and utilities of RAD51C are found in John Hopkins OMIM database record ID 602774, and in references numbered 86-87 listed hereinbelow.

[0796] Reference is now made to RAD51C BINDING SITE. RAD51 (S. cerevisiae) homolog C (RAD51C) is a host target gene of VGAM20, corresponding to VGAM20-HOST-TARGET GENE of FIG. 20A. RAD51C BINDING SITE is a host binding site found in the 3′ untranslated region of RAD51C, corresponding to HOST BINDING SITE of FIG. 20A. FIG. 20D illustrates the complementarity of the nucleotide sequence of RAD51C BINDING SITE, designated SEQ ID:84, to the nucleotide sequence of VGAM20 RNA of FIG. 20A, designated SEQ ID:80.

[0797] Yet another function of VGAM20 is therefore inhibition of RAD51 (S. cerevisiae) homolog C (RAD51C), a host gene which encodes a Protein that is a member of the RAD51 family of strand-transfer proteins, as part of a novel viral mechanism used by Alcelaphine herpesvirus 1 for attacking a host. Accordingly, utilities of VGAM20 include diagnosis, prevention and treatment of viral infection by Alcelaphine herpesvirus 1.

[0798] The function of RAD51C has been established by previous studies. The RAD51 family of related genes, identified in both yeast and humans, encode strand-transfer proteins thought to be involved in recombinational repair of DNA damage and in meiotic recombination. Several members of the mammalian RAD51 gene family have been identified; see, for example, RAD51A (179617), RAD51B (602948), XRCC3 (600675), and DMC1 (602721). Dosanjh et al. (1998) isolated and characterized a novel member of the RAD51 family, which they designated RAD51C. The authors identified several clones with amino acid similarity to the human XRCC3 and yeast Rad51 proteins by screening an EST database. They then isolated a full-length RAD51C cDNA from a human leukocyte cDNA library. The RAD51C cDNA encodes a predicted 376-amino acid protein that has 18 to 26% amino acid identity with other members of the human RAD51 family. By Northern blot analysis, Dosanjh et al. (1998) showed that RAD51C is expressed as an approximately 1.3-kb mRNA in a variety of human tissues, with highest expression in testis, heart muscle, spleen and prostate. Using a yeast 2-hybrid system, they demonstrated that the RAD51C protein interacts strongly with RAD51B and moderately with XRCC3, but not with itself.

[0799] Full details of the abovementioned studies are described in the following publications, the disclosure of which are hereby incorporated by reference:
[0800] osanjh, M. K.; Collins, D. W.; Fan, W.; Lennon, G. G.; Albala, J. S.; Shen, Z.; Schild, D.: Isolation and characterization of RAD51C, a new human member of the RAD51 family of related genes. Nucleic Acids Res. 26: 1179-1184, 1998. PubMed ID: 9469824 2. Masson, J.-Y.; Stasiak, A. Z.; Stasiak, A.; Benson, F. E.; West, S. C.: Complex formation by the human RAD51C and XRCC3 recombination repair proteins. Proc. Nat. Acad. Sci. 98: 8440-8446, 2001.

[0801] Further studies establishing the function and utilities of RAD51C are found in John Hopkins OMIM database record ID 602774, and in references numbered 86-87 listed hereinbelow.

[0802] Reference is now made to RAD51C BINDING SITE. RAD51 (S. cerevisiae) homolog C (RAD51C) is a host target gene of VGAM20, corresponding to VGAM20-HOST-TARGET GENE of FIG. 20A. RAD51C BINDING SITE is a host binding site found in the 3′ untranslated region of RAD51C, corresponding to HOST BINDING SITE of FIG. 20A. FIG. 20D illustrates the complementarity of the nucleotide sequence of RAD51C BINDING SITE, designated SEQ ID:84, to the nucleotide sequence of VGAM20 RNA of FIG. 20A, designated SEQ ID:80.

[0803] Yet another function of VGAM20 is therefore inhibition of RAD51 (S. cerevisiae) homolog C (RAD51C), a host gene which encodes a Protein that is a member of the RAD51 family of strand-transfer proteins, as part of a novel viral mechanism used by Alcelaphine herpesvirus 1 for attacking a host. Accordingly, utilities of VGAM20 include diagnosis, prevention and treatment of viral infection by Alcelaphine herpesvirus 1.

[0804] The function of RAD51C has been established by previous studies. The RAD51 family of related genes, identified in both yeast and humans, encode strand-transfer proteins thought to be involved in recombinational repair of DNA damage and in meiotic recombination. Several members of the mammalian RAD51 gene family have been identified; see, for example, RAD51A (179617), RAD51B (602948), XRCC3 (600675), and DMC1 (602721). Dosanjh et al. (1998) isolated and characterized a novel member of the RAD51 family, which they designated RAD51C. The authors identified several clones with amino acid similarity to the human XRCC3 and yeast Rad51 proteins by screening an EST database. They then isolated a full-length RAD51C cDNA from a human leukocyte cDNA library. The RAD51C cDNA encodes a predicted 376-amino acid protein that has 18 to 26% amino acid identity with other members of the human RAD51 family. By Northern blot analysis, Dosanjh et al. (1998) showed that RAD51C is expressed as an approximately 1.3-kb mRNA in a variety of human tissues, with highest expression in testis, heart muscle, spleen and prostate. Using a yeast 2-hybrid system, they demonstrated that the RAD51C protein interacts strongly with RAD51B and moderately with XRCC3, but not with itself.

[0805] Full details of the abovementioned studies are described in the following publications, the disclosure of which are hereby incorporated by reference:
[0806] osanjh, M. K.; Collins, D. W.; Fan, W.; Lennon, G. G.; Albala, J. S.; Shen, Z.; Schild, D.: Isolation and characterization of RAD51C, a new human member of the RAD51 family of related genes. Nucleic Acids Res. 26: 1179-1184, 1998. PubMed ID: 9469824 2. Masson, J.-Y.; Stasiak, A. Z.; Stasiak, A.; Benson, F. E.; West, S. C.: Complex formation by the human RAD51C and XRCC3 recombination repair proteins. Proc. Nat. Acad. Sci. 98: 8440-8446, 2001.

[0807] Further studies establishing the function and utilities of RAD51C are found in John Hopkins OMIM database record ID 602774, and in references numbered 86-87 listed hereinbelow.

[0808] Reference is now made to RAD51C BINDING SITE. RAD51 (S. cerevisiae) homolog C (RAD51C) is a host target gene of VGAM20, corresponding to VGAM20-HOST-TARGET GENE of FIG. 20A. RAD51C BINDING SITE is a host binding site found in the 3′ untranslated region of RAD51C, corresponding to HOST BINDING SITE of FIG. 20A. FIG. 20D illustrates the complementarity of the nucleotide sequence of RAD51C BINDING SITE, designated SEQ ID:84, to the nucleotide sequence of VGAM20 RNA of FIG. 20A, designated SEQ ID:80.

[0809] Yet another function of VGAM20 is therefore inhibition of RAD51 (S. cerevisiae) homolog C (RAD51C), a host gene which encodes a Protein that is a member of the RAD51 family of strand-transfer proteins, as part of a novel viral mechanism used by Alcelaphine herpesvirus 1 for attacking a host. Accordingly, utilities of VGAM20 include diagnosis, prevention and treatment of viral infection by Alcelaphine herpesvirus 1.

[0810] The function of RAD51C has been established by previous studies. The RAD51 family of related genes, identified in both yeast and humans, encode strand-transfer proteins thought to be involved in recombinational repair of DNA damage and in meiotic recombination. Several members of the mammalian RAD51 gene family have been identified; see, for example, RAD51A (179617), RAD51B (602948), XRCC3 (600675), and DMC1 (602721). Dosanjh et al. (1998) isolated and characterized a novel member of the RAD51 family, which they designated RAD51C. The authors identified several clones with amino acid similarity to the human XRCC3 and yeast Rad51 proteins by screening an EST database. They then isolated a full-length RAD51C cDNA from a human leukocyte cDNA library. The RAD51C cDNA encodes a predicted 376-amino acid protein that has 18 to 26% amino acid identity with other members of the human RAD51 family. By Northern blot analysis, Dosanjh et al. (1998) showed that RAD51C is expressed as an approximately 1.3-kb mRNA in a variety of human tissues, with highest expression in testis, heart muscle, spleen and prostate. Using a yeast 2-hybrid system, they demonstrated that the RAD51C protein interacts strongly with RAD51B and moderately with XRCC3, but not with itself.

[0811] Full details of the abovementioned studies are described in the following publications, the disclosure of which are hereby incorporated by reference:
[0812] osanjh, M. K.; Collins, D. W.; Fan, W.; Lennon, G. G.; Albala, J. S.; Shen, Z.; Schild, D.: Isolation and characterization of RAD51C, a new human member of the RAD51 family of related genes. Nucleic Acids Res. 26: 1179-1184, 1998. PubMed ID: 9469824 2. Masson, J.-Y.; Stasiak, A. Z.; Stasiak, A.; Benson, F. E.; West, S. C.: Complex formation by the human RAD51C and XRCC3 recombination repair proteins. Proc. Nat. Acad. Sci. 98: 8440-8446, 2001.

[0813] Further studies establishing the function and utilities of RAD51C are found in John Hopkins OMIM database record ID 602774, and in references numbered 86-87 listed hereinbelow.

[0814] Reference is now made to FIG. 21A, which is a simplified diagram providing a conceptual explanation of the mode by which a novel bioinformatically detected viral gene, referred to here as Viral Genomic Address Messenger 21 (VGAM21) modulates expression of host target genes thereof, the function and utility of which host target genes is known in the art.

[0815] VGAM21 is a novel bioinformatically detected regulatory, non protein coding, viral micro RNA (miRNA) gene. The method by which VGAM21 was detected is described hereinabove with reference to FIGS. 2-8.

[0816] VGAM21 GENE is a viral gene contained in the genome of Porcine adenovirus A. VGAM21-HOST TARGET GENE is a human gene contained in the human genome.

[0817] VGAM21 GENE encodes a VGAM21 PRECURSOR RNA. Similar to other miRNA genes, and unlike most ordinary genes, the RNA transcribed by VGAM21, VGAM21 PRECURSOR RNA, does not encoded a protein.

[0818] VGAM21 PRECURSOR RNA folds onto itself, forming VGAM21 FOLDED PRECURSOR RNA. As FIG. 21 illustrates, VGAM21 FOLDED PRECURSOR RNA forms a ‘hairpin structure’, folding onto itself. As is well known in the art, this ‘hairpin structure’, is typical of RNA encoded by miRNA genes, and is due to the fact that the nucleotide sequence of the first half of the RNA encoded by a miRNA gene is an accurate or partial inversed-reversed sequence of the nucleotide sequence of the second half thereof. By “inversed-reversed” is meant a sequence which is reversed and wherein each nucleotide is replaced by a complimentary nucleotide, as is well known in the art (e.g. ATGGC is the inversed-reversed sequence of GCCAT).

[0819] An enzyme complex designated DICER COMPLEX, ‘dices’ the VGAM21 FOLDED PRECURSOR RNA into a single stranded ˜22 nt long RNA segment, designated VGAM21 RNA. As is known in the art, ‘dicing’ of a hairpin structured RNA precursor product into short a ˜22 nt RNA segment is catalyzed by an enzyme complex comprising an enzyme called Dicer together with other necessary proteins.

[0820] VGAM21-HOST TARGET GENE encodes a corresponding messenger RNA, designated VGAM21-HOST-TARGET RNA. VGAM21-HOST-TARGET RNA comprises three regions, as is typical of mRNA of a protein coding gene: a 5′ untranslated region, a protein coding region and a 3′ untranslated region, designated 5′UTR, PROTEIN CODING and 3′UTR respectively.

[0821] VGAM21 RNA binds complimentarily to a HOST BINDING SITE, located on an untranslated region of VGAM21-HOST-TARGET RNA. This complimentarily binding is due to the fact that the nucleotide sequence of VGAM21 RNA is an accurate or a partial inversed-reversed sequence of the nucleotide sequence of HOST BINDING SITE. It is appreciated that while FIG. 21A depicts the HOST BINDING SITE on the 3′UTR region, this is meant as an example only—the HOST BINDING SITE may be located on the 5′UTR region as well.

[0822] The complimentary binding of VGAM21 RNA to HOST BINDING SITE inhibits translation of VGAM21-HOST-TARGET RNA into VGAM21-HOST-TARGET PROTEIN. VGAM21-HOST-TARGET PROTEIN is therefore outlined by a broken line.

[0823] It is appreciated that VGAM21-HOST-TARGET GENE in fact represents a plurality of host target genes of VGAM21. The mRNA of each of this plurality of host target genes of VGAM21 comprises a HOST BINDING SITE, having a nucleotide sequence which is at least partly complementary to VGAM21 RNA, and which when bound by VGAM21 RNA causes inhibition of translation of one of a plurality of host target proteins of VGAM21. The plurality of host target genes of VGAM21 and their respective host binding sites, are described hereinbelow with reference to FIG. 21D.

[0824] It is appreciated by one skilled in the art that the mode of translational inhibition illustrated by FIG. 21A with specific reference to translational inhibition exerted by VGAM21 on one or more host target genes of VGAM21, is in fact common to other known miRNA genes. As mentioned hereinabove with reference to the background section, although a specific complimentary binding site has been demonstrated only for miRNA genes Lin-4 and Let-7, all other recently discovered miRNA genes are also believed by those skilled in the art to modulate expression of other genes by complimentary binding, although specific complimentary binding sites of these genes have not yet been found (Ruvkun G., ‘Perspective: Glimpses of a tiny RNA world’, Science 294, 779 (2001)).

[0825] It is further appreciated that a function of VGAM21 is inhibition of expression of host target genes, as part of a novel viral mechanism of attacking a host. Accordingly, utilities of VGAM21 include diagnosis, prevention and treatment of viral infection by Porcine adenovirus A.

[0826] Reference is now made to FIG. 21B which shows the nucleotide sequence of VGAM21 PRECURSOR RNA of FIG. 21A, designated SEQ ID:95, and a probable nucleotide sequence of VGAM21 RNA of FIG. 21A, designated SEQ ID:96. The nucleotide sequence of SEQ ID:96, which is highly likely (over 75%) to be identical or highly similar to that of VGAM21, is marked by an underline within the sequence of VGAM21 PRECURSOR RNA.

[0827] Reference is now made to FIG. 21C, which shows the secondary folding of VGAM21 PRECURSOR RNA, forming a ‘hairpin structure’ designated VGAM21 FOLDED PRECURSOR RNA, both of FIG. 21A. A probable (>75%) nucleotide sequence of VGAM21 RNA, designated SEQ ID:96 of FIG. 21B, is marked by an underline on VGAM21 FOLDED PRECURSOR RNA. It is appreciated that the complimentary base-paring is not perfect, with ‘bulges’, as is well known in the art with respect to the RNA folding of all known miRNA genes.

[0828] Reference is now made to FIG. 21D, which is a table showing binding sites found in untranslated regions of a plurality of host target genes of VGAM21, each binding site corresponding to HOST BINDING SITE of FIG. 21A, and their complementarity to SEQ ID:96, which is highly likely (>75%) to be identical or highly similar to the nucleotide sequence of VGAM21 RNA of FIG. 21A.

[0829] As mentioned hereinabove with reference to FIG. 21A a function of VGAM21 is inhibition of expression of host target genes, as part of a novel viral mechanism of attacking a host. Accordingly, utilities of VGAM21 include diagnosis, prevention and treatment of viral infection by Porcine adenovirus A. It is appreciated that specific functions, and accordingly utilities, of VGAM21 correlate with, and may be deduced from, the identity of the host target genes which VGAM21 binds and inhibits, and the function of these host target genes, as elaborated hereinbelow.

[0830] Reference is now made to ACTA1 BINDING SITE. actin, alpha 1, skeletal muscle (ACTA1) is a host target gene of VGAM21, corresponding to VGAM21-HOST-TARGET GENE of FIG. 21A. ACTA1 BINDING SITE is a host binding site found in the 5′ untranslated region of ACTA1, corresponding to HOST BINDING SITE of FIG. 21A. FIG. 21D illustrates the complementarity of the nucleotide sequence of ACTA1 BINDING SITE, designated SEQ ID:97, to the nucleotide sequence of VGAM21 RNA of FIG. 21A, designated SEQ ID:96.

[0831] A function of VGAM21 is therefore inhibition of actin, alpha 1, skeletal muscle (ACTA1), a host gene which encodes a Protein that is associated with muscle diseases: congenital myopathy with excess of thin myofilaments, as part of a novel viral mechanism used by Porcine adenovirus A for attacking a host. Accordingly, utilities of VGAM21 include diagnosis, prevention and treatment of viral infection by Porcine adenovirus A.

[0832] The function of ACTA1 has been established by previous studies. By use of a cDNA probe in somatic cell hybrids, Hanauer et al. (1984) assigned the gene for the alpha chain of skeletal muscle actin to chromosome 1. Actin sequences were found at high stringency also at 2p23-qter and 3pter-q21. Under conditions of low or medium stringency, actin sequences were demonstrated on the X (p11-p12) and Y chromosomes. Using a cDNA copy of the 3-prime untranslated region of the human skeletal alpha actin gene, Shows et al. (1984) mapped the gene to 1p12-1qter. This gene and that for cardiac alpha-actin (102540) are coexpressed in both human skeletal muscle and heart. Coexpression is not a function of linkage; the loci are on separate chromosomes: 1p21-qter and 15q11-qter, respectively (Gunning et al., 1984). Akkari et al. (1994) narrowed the assignment of the ACTA1 gene to 1q42 by fluorescence in situ hybridization. Also by fluorescence in situ hybridization, Ueyama et al. (1995) mapped the gene to 1q42.1. Using a panel of somatic cell hybrids, Alonso et al. (1993) confirmed the localization of the ACTA1 gene on human chromosome 1. On the basis of analysis of mouse/hamster somatic cell hybrids segregating mouse chromosomes, Czosnek et al. (1982) concluded that the skeletal actin gene is located on mouse chromosome 3. However, Alonso et al. (1993) found by PCR analysis of a microsatellite in an interspecific backcross that the gene, symbolized Actsk-1, is closely linked to tyrosine aminotransferase and adenine phosphoribosyltransferase on mouse chromosome 8. The Actsk-1 gene is situated between Tat and Aprt; the human homologs TAT (276600) and APRT (102600) are on human chromosome 16. Abonia et al. (1993) likewise mapped the Actsk-1 gene to mouse chromosome 8 by segregation of RFLVs in 2 interspecific backcross sets and in 4 recombinant inbred (RI) mouse sets. Nowak et al. (1999) reported mutations in the human skeletal muscle alpha-actin gene in association with 2 different muscle diseases: congenital myopathy with excess of thin myofilaments, also known as actin myopathy (Goebel et al., 1997), and nemaline myopathy (see 161800 and 256030). Both diseases are characterized by structural abnormalities of muscle fibers and variable degrees of muscle weakness. Nowak et al. (1999) identified 15 different missense mutations resulting in 14 different amino acid changes.

[0833] Full details of the abovementioned studies are described in the following publications, the disclosure of which are hereby incorporated by reference:
[0834] bonia, J. P.; Abel, K. J.; Eddy, R. L.; Elliott, R. W.; Chapman, V. M.; Shows, T. B.; Gross, K. W.: Linkage of Agt and Actsk-1 to distal mouse chromosome 8 loci: a new conserved linkage. Mammalian Genome 4: 25-32, 1993. PubMed ID: 8093670 10. Nowak, K. J.; Wattanasirichaigoon, D.; Goebel, H. H.; Wilce, M.; Pelin, K.; Donner, K.; Jacob, R. L.; Hubner, C.; Oexle, K.; Anderson, J. R.; Verity, C. M.; North, K. N.; and 13 others: Mutations in the skeletal muscle alpha-actin gene in patients with actin myopathy and nemaline myopathy. Nature Genet. 23: 208-212, 1999.

[0835] Further studies establishing the function and utilities of ACTA1 are found in John Hopkins OMIM database record ID 102610, and in references numbered 88-99 listed hereinbelow.

[0836] Reference is now made to EXTL1 BINDING SITE. exostoses (multiple)-like 1 (EXTL1) is a host target gene of VGAM21, corresponding to VGAM21-HOST-TARGET GENE of FIG. 21A. EXTL1 BINDING SITE is a host binding site found in the 5′ untranslated region of EXTL1, corresponding to HOST BINDING SITE of FIG. 21A. FIG. 21D illustrates the complementarity of the nucleotide sequence of EXTL1 BINDING SITE, designated SEQ ID:98, to the nucleotide sequence of VGAM21 RNA of FIG. 21A, designated SEQ ID:96.

[0837] Yet another function of VGAM21 is therefore inhibition of exostoses (multiple)-like 1 (EXTL1), a host gene which encodes a Protein that probably contribute to the synthesis of heparan sulfate and heparin., as part of a novel viral mechanism used by Porcine adenovirus A for attacking a host. Accordingly, utilities of VGAM21 include diagnosis, prevention and treatment of viral infection by Porcine adenovirus A.

[0838] The function of EXTL1 has been established by previous studies. The tumor suppressors EXT1 (133700) and EXT2 (133701) are associated with hereditary multiple exostoses and encode bifunctional glycosyltransferases essential for chain polymerization of heparan sulfate and its analog, heparin. Wise et al. (1997) identified another gene, termed EXTL by them, that showed striking sequence similarity to both EXT1 and EXT2 at the nucleotide and amino acid sequence levels. Although the mRNA transcribed from this gene is similar in size to that of EXT1 and EXT2, its pattern of expression was quite different. Of the 3 highly homologous EXT-like genes, EXTL1, EXTL2 (602411), and EXTL3 (605744), EXTL2 is an alpha-1,4-GlcNAc transferase I, the key enzyme that initiates the heparan sulfate/heparin synthesis. Kim et al. (2001) transiently expressed truncated forms of EXTL1 and EXTL3, lacking the putative NH2-terminal transmembrane and cytoplasmic domains, in COS-1 cells and found that the cells harbored alpha-GlcNAc transferase activity. Various results suggested that EXTL3 is most likely involved in both chain initiation and elongation, whereas EXTL1 is possibly involved only in the chain elongation of heparan sulfate, and perhaps of heparin as well. Thus, the acceptor specificities of the 5 family members are overlapping but distinct, except for EXT1 and EXT2, which have the same specificity. Thus, all of the 5 cloned human EXT gene family proteins harbor glycosyltransferase activities, which probably contribute to the synthesis of heparan sulfate and heparin. Xu et al. (1999) examined the EXTL1 and EXTL2 genes for the presence of germline mutations in hereditary multiple exostosis patients and found none. Hall et al. (2002) proposed the EXTL genes as candidates for second mutations leading to the development of exostoses. By radiation hybrid analysis and by fluorescence in situ hybridization, Wise et al. (1997) mapped EXTL to 1p36.1 between D1S458 and D1S511, a region that frequently shows loss of heterozygosity in a variety of tumor types.

[0839] Full details of the abovementioned studies are described in the following publications, the disclosure of which are hereby incorporated by reference:
[0840] ise, C. A.; Clines, G. A.; Massa, H.; Trask, B. J.; Lovett, M.: Identification and localization of the gene for EXTL, a third member of the multiple exostoses gene family. Genome Res. 7: 10-16, 1997. PubMed ID: 9037597 2. Kim, B.-T.; Kitagawa, H.; Tamura, J.; Saito, T.; Kusche-Gullberg, M.; Lindahl, U.; Sugahara, K.: Human tumor suppressor EXT gene family members EXTL1 and EXTL3 encode alpha-1,4-N-acetylgluco saminyltransferases that likely are involved in heparan sulfate/heparin biosynthesis. Proc. Nat. Acad. Sci. 98: 7176-7181, 2001.

[0841] Further studies establishing the function and utilities of EXTL1 are found in John Hopkins OMIM database record ID 601738, and in references numbered 16-19 listed hereinbelow.

[0842] Reference is now made to FMNL BINDING SITE. formin-like (FMNL) is a host target gene of VGAM21, corresponding to VGAM21-HOST-TARGET GENE of FIG. 21A. FMNL BINDING SITE is a host binding site found in the 3′ untranslated region of FMNL, corresponding to HOST BINDING SITE of FIG. 21A. FIG. 21D illustrates the complementarity of the nucleotide sequence of FMNL BINDING SITE, designated SEQ ID:99, to the nucleotide sequence of VGAM21 RNA of FIG. 21A, designated SEQ ID:96.

[0843] An additional function of VGAM21 is therefore inhibition of formin-like (FMNL), a host gene which encodes a Protein that controls the reorganization of the actin cytoskeleton in association with Rac, as part of a novel viral mechanism used by Porcine adenovirus A for attacking a host. Accordingly, utilities of VGAM21 include diagnosis, prevention and treatment of viral infection by Porcine adenovirus A.

[0844] The function of FMNL has been established by previous studies. By sequencing a recombinant cosmid library, Aronsson et al. (1998) identified 2 genes, NIK (604655) and C17ORF1B. Northern blot analysis revealed that C17ORF1B is expressed as a 1.8-kb transcript in heart, brain, placenta, lung, liver, skeletal muscle, kidney, and pancreas. By directed sequencing of the cosmid library, Aronsson et al. (1998) showed that C17ORF1B contains 11 exons spanning 5.1 kb of genomic DNA. Yayoshi-Yamamoto et al. (2000) isolated cDNAs encoding mouse Frl-alpha and Frl-beta (formin-related gene in leukocytes) that appeared to be homologs of C17ORF1B. Western blot, immunofluorescence, and Northern blot analyses showed that Frl is expressed as a 160-kD cytosolic protein that is highly expressed in spleen, lymph node, and bone marrow cells and that it associates with Rac (see 602048) and profilin (see 176610). Yayoshi-Yamamoto et al. (2000) suggested that Frl may play a role in the control of reorganization of the actin cytoskeleton in association with Rac and in the regulation of the signal for cell survival. By FISH and radiation hybrid analysis, Aronsson et al. (1998) mapped the C17ORF1B gene to chromosome 17q21. Using exon-intron maps and mutation screening, Aronsson et al. (1998) found no disease-specific alterations in the C17ORF1B gene in a pedigree with frontotemporal dementia and parkinsonism linked to chromosome 17 (600274).

[0845] Full details of the abovementioned studies are described in the following publications, the disclosure of which are hereby incorporated by reference:
[0846] ronsson, F. C.; Magnusson, P.; Andersson, B.; Karsten, S. L.; Shibasaki, Y.; Lendon, C. L.; Goate, A. M.; Brookes, A. J.: The NIK protein kinase and C17orf1 genes: chromosomal mapping, gene structures and mutational screening in frontotemporal dementia and parkinsonism linked to chromosome 17. Hum. Genet. 103: 340-345, 1998. PubMed ID: 9799091 2. Yayoshi-Yamamoto, S.; Taniuchi, I.; Watanabe, T.: FRL, a novel formin-related protein, binds to Rac and regulates cell motility and survival of macrophages. Molec. Cell. Biol. 20: 6872-6881, 2000.

[0847] Further studies establishing the function and utilities of FMNL are found in John Hopkins OMIM database record ID 604656, and in references numbered 100-101 listed hereinbelow.

[0848] Reference is now made to PHKA2 BINDING SITE. phosphorylase kinase, alpha 2 (liver) (PHKA2) is a host target gene of VGAM21, corresponding to VGAM21-HOST-TARGET GENE of FIG. 21A. PHKA2 BINDING SITE is a host binding site found in the 5′ untranslated region of PHKA2, corresponding to HOST BINDING SITE of FIG. 21A. FIG. 21D illustrates the complementarity of the nucleotide sequence of PHKA2 BINDING SITE, designated SEQ ID:100, to the nucleotide sequence of VGAM21 RNA of FIG. 21A, designated SEQ ID:96.

[0849] A further function of VGAM21 is therefore inhibition of phosphorylase kinase, alpha 2 (liver) (PHKA2), a host gene which encodes a Enzyme that is associated with LIVER GLYCOGENOSIS, X-LINKED, TYPE I (glycogen storage disease viii), as part of a novel viral mechanism used by Porcine adenovirus A for attacking a host. Accordingly, utilities of VGAM21 include diagnosis, prevention and treatment of viral infection by Porcine adenovirus A.

[0850] The function of PHKA2 has been established by previous studies. Deficiency of liver phosphorylase kinase (PHK; ATP:phosphotransferase; EC 2.7.1.38) produces one of the mildest of the glycogenoses of man. The clinical symptoms include hepatomegaly, growth retardation, elevation of glutamate-pyruvate transaminase and glutamate-oxaloacetate transaminase, hypercholesterolemia, hypertriglyceridemia, and fasting hyperketosis (Schimke et al., 1973; Willems et al., 1990). With age, these clinical and biochemical abnormalities gradually disappear and most adult patients are asymptomatic (Willems et al., 1990). Nagai et al. (1988) described renal tubular acidosis in a 2.5-year-old Japanese boy with phosphorylase kinase deficiency X-linked phosphorylase b kinase deficiency is similar to glycogen storage disease VI in that both have low phosphorylase activity in the absence of adenosine monophosphate (AMP); it differs in that phosphorylase kinase activity is low (Huijing, 1967). Williams and Field (1961) found low leukocyte phosphorylase activity in 2 affected brothers and normal activity in an unaffected brother and in the father. An intermediately low level in the mother, together with affected males, suggested X-linked inheritance. Wallis et al. (1966) restudied the family and with new methods found support for X-linkage. Huijing and Fernandez (1969) studied 2 kindreds, one of which had 6 affected plus 2 possibly affected males. The other had 20 affected males, 2 affected females, and 7 probably affected males. Huijing and Fernandez (1970) suggested that the affected females studied by Hug et al. (1969) were heterozygotes. Since phosphorylase kinase is known to be enzymatically activated (Krebs et al., 1964), it is possible that an activating enzyme is controlled by the X chromosome. By cloning cells of heterozygotes, Migeon and Huijing (1974) demonstrated some fibroblasts with enzymatic levels like those of affected hemizygotes. This was presented as proof of X-linkage and X-inactivation of the phosphorylase kinase locus. An X-linked codominant electrophoretic polymorphism of phosphorylase kinase is known in the mouse (Lyon et al., 1967). Huijing (1970) pointed out similarities and differences of the human and murine defects. Malthus et al. (1980) described deficiency of liver phosphorylase kinase in rats and concluded that it is autosomal recessive. This may not be a true exception to Ohno's law of the evolutionary conservatism of the X chromosome; see comment of Hug (1974) above. Schneider et al. (1993) reviewed the animal mutants that result in PHK-linked glycogenoses. Two different X-linked disorders are known, as well as an autosomal recessive PHK deficiency affecting the liver and most other tissues but not muscle, in the rat

[0851] Full details of the abovementioned studies are described in the following publications, the disclosure of which are hereby incorporated by reference:
[0852] Willems, P. J.; Gerver, W. J. M.; Berger, R.; Fernandes, J.: The natural history of liver glycogenosis due to phosphorylase kinase deficiency: a longitudinal study of 41 patients. Europ. J. Pediat. 149: 268-271, 1990. PubMed ID: 2303074 Schneider, A.; Davidson, J. J.; Wullrich, A.; Kilimann, M. W.: Phosphorylase kinase deficiency in I-strain mice is associated with a frameshift mutation in the alpha-subunit muscle isoform. Nature Genet. 5: 381-385, 1993.

[0853] Further studies establishing the function and utilities of PHKA2 are found in John Hopkins OMIM database record ID 306000, and in references numbered 102-143 listed hereinbelow.

[0854] Reference is now made to PTK2 BINDING SITE. PTK2 protein tyrosine kinase 2 (PTK2) is a host target gene of VGAM21, corresponding to VGAM21-HOST-TARGET GENE of FIG. 21A. PTK2 BINDING SITE is a host binding site found in the 3′ untranslated region of PTK2, corresponding to HOST BINDING SITE of FIG. 21A. FIG. 21D illustrates the complementarity of the nucleotide sequence of PTK2 BINDING SITE, designated SEQ ID:101, to the nucleotide sequence of VGAM21 RNA of FIG. 21A, designated SEQ ID:96.

[0855] Yet a further function of VGAM21 is therefore inhibition of PTK2 protein tyrosine kinase 2 (PTK2), a host gene which encodes a Enzyme that involves in intracellular signal transduction pathway and is a putative homolog of chicken focal adhesion associated kinase., as part of a novel viral mechanism used by Porcine adenovirus A for attacking a host. Accordingly, utilities of VGAM21 include diagnosis, prevention and treatment of viral infection by Porcine adenovirus A.

[0856] The function of PTK2 has been established by previous studies. Andre and Becker-Andre (1993) described focal adhesion kinase, also known as cytoplasmic protein-tyrosine kinase (PTK2), which lacks any significant homology with other kinases. See also 601212. It concentrates in the focal adhesions that form between cells growing in the presence of extracellular matrix constituents, such as fibronectin. PTK2 contains phosphotyrosine in growing BALB/c 3T3 cells but contains little or no phosphotyrosine in cells detached by trypsinization. The tyrosine-phosphorylated state is regained within minutes when the cells are replated and anchored onto fibronectin. PTK2 appears to be a major substrate for the Rous virus-encoded oncoprotein, pp60v-src (see 190090), which transforms and confers anchorage independence on chicken embryo fibroblasts. A marked increase in tyrosine phosphorylation of PTK2 is also observed after treatment of cells with cholecystokinin, bombesin, vasopressin, and endothelin. Thus, activation of PTK2 may be an important early step in cell growth and intracellular signal transduction pathways triggered in response to several neural peptides and/or to cell interactions with the extracellular matrix. Andre and Becker-Andre (1993) cloned a cDNA for human PTK2 using PCR methods. They detected expression of PTK2 in all organs tested, with the highest levels in brain and the lowest levels in heart and skeletal muscle. Andre and Becker-Andre (1993) detected an additional transcript in the brain encoding an N-terminally truncated form of the protein.

[0857] Full details of the abovementioned studies are described in the following publications, the disclosure of which are hereby incorporated by reference:
[0858] ndre, E.; Becker-Andre, M.: Expression of an N-terminally truncated form of human focal adhesion kinase in brain. Biochem. Biophys. Res. Commun. 190: 140-147, 1993. PubMed ID: 8422239 2. Fiedorek, F. T., Jr.; Kay, E. S.: Mapping of the focal adhesion kinase (Fadk) gene to mouse chromosome 15 and human chromosome 8. Mammalian Genome 6: 123-126, 1995.

[0859] Further studies establishing the function and utilities of PTK2 are found in John Hopkins OMIM database record ID 600758, and in references numbered 144-147 listed hereinbelow.

[0860] Reference is now made to PTK2 BINDING SITE. PTK2 protein tyrosine kinase 2 (PTK2) is a host target gene of VGAM21, corresponding to VGAM21-HOST-TARGET GENE of FIG. 21A. PTK2 BINDING SITE is a host binding site found in the 3′ untranslated region of PTK2, corresponding to HOST BINDING SITE of FIG. 21A. FIG. 21D illustrates the complementarity of the nucleotide sequence of PTK2 BINDING SITE, designated SEQ ID:101, to the nucleotide sequence of VGAM21 RNA of FIG. 21A, designated SEQ ID:96.

[0861] Yet a further function of VGAM21 is therefore inhibition of PTK2 protein tyrosine kinase 2 (PTK2), a host gene which encodes a Enzyme that involves in intracellular signal transduction pathway and is a putative homolog of chicken focal adhesion associated kinase., as part of a novel viral mechanism used by Porcine adenovirus A for attacking a host. Accordingly, utilities of VGAM21 include diagnosis, prevention and treatment of viral infection by Porcine adenovirus A.

[0862] The function of PTK2 has been established by previous studies. Andre and Becker-Andre (1993) described focal adhesion kinase, also known as cytoplasmic protein-tyrosine kinase (PTK2), which lacks any significant homology with other kinases. See also 601212. It concentrates in the focal adhesions that form between cells growing in the presence of extracellular matrix constituents, such as fibronectin. PTK2 contains phosphotyrosine in growing BALB/c 3T3 cells but contains little or no phosphotyrosine in cells detached by trypsinization. The tyrosine-phosphorylated state is regained within minutes when the cells are replated and anchored onto fibronectin. PTK2 appears to be a major substrate for the Rous virus-encoded oncoprotein, pp60v-src (see 190090), which transforms and confers anchorage independence on chicken embryo fibroblasts. A marked increase in tyrosine phosphorylation of PTK2 is also observed after treatment of cells with cholecystokinin, bombesin, vasopressin, and endothelin. Thus, activation of PTK2 may be an important early step in cell growth and intracellular signal transduction pathways triggered in response to several neural peptides and/or to cell interactions with the extracellular matrix. Andre and Becker-Andre (1993) cloned a cDNA for human PTK2 using PCR methods. They detected expression of PTK2 in all organs tested, with the highest levels in brain and the lowest levels in heart and skeletal muscle. Andre and Becker-Andre (1993) detected an additional transcript in the brain encoding an N-terminally truncated form of the protein.

[0863] Full details of the abovementioned studies are described in the following publications, the disclosure of which are hereby incorporated by reference:
[0864] ndre, E.; Becker-Andre, M.: Expression of an N-terminally truncated form of human focal adhesion kinase in brain. Biochem. Biophys. Res. Commun. 190: 140-147, 1993. PubMed ID: 8422239 2. Fiedorek, F. T., Jr.; Kay, E. S.: Mapping of the focal adhesion kinase (Fadk) gene to mouse chromosome 15 and human chromosome 8. Mammalian Genome 6: 123-126, 1995.

[0865] Further studies establishing the function and utilities of PTK2 are found in John Hopkins OMIM database record ID 600758, and in references numbered 144-147 listed hereinbelow.

[0866] Reference is now made to PTK2 BINDING SITE. PTK2 protein tyrosine kinase 2 (PTK2) is a host target gene of VGAM21, corresponding to VGAM21-HOST-TARGET GENE of FIG. 21A. PTK2 BINDING SITE is a host binding site found in the 3′ untranslated region of PTK2, corresponding to HOST BINDING SITE of FIG. 21A. FIG. 21D illustrates the complementarity of the nucleotide sequence of PTK2 BINDING SITE, designated SEQ ID:101, to the nucleotide sequence of VGAM21 RNA of FIG. 21A, designated SEQ ID:96.

[0867] Yet a further function of VGAM21 is therefore inhibition of PTK2 protein tyrosine kinase 2 (PTK2), a host gene which encodes a Enzyme that involves in intracellular signal transduction pathway and is a putative homolog of chicken focal adhesion associated kinase., as part of a novel viral mechanism used by Porcine adenovirus A for attacking a host. Accordingly, utilities of VGAM21 include diagnosis, prevention and treatment of viral infection by Porcine adenovirus A.

[0868] The function of PTK2 has been established by previous studies. Andre and Becker-Andre (1993) described focal adhesion kinase, also known as cytoplasmic protein-tyrosine kinase (PTK2), which lacks any significant homology with other kinases. See also 601212. It concentrates in the focal adhesions that form between cells growing in the presence of extracellular matrix constituents, such as fibronectin. PTK2 contains phosphotyrosine in growing BALB/c 3T3 cells but contains little or no phosphotyrosine in cells detached by trypsinization. The tyrosine-phosphorylated state is regained within minutes when the cells are replated and anchored onto fibronectin. PTK2 appears to be a major substrate for the Rous virus-encoded oncoprotein, pp60v-src (see 190090), which transforms and confers anchorage independence on chicken embryo fibroblasts. A marked increase in tyrosine phosphorylation of PTK2 is also observed after treatment of cells with cholecystokinin, bombesin, vasopressin, and endothelin. Thus, activation of PTK2 may be an important early step in cell growth and intracellular signal transduction pathways triggered in response to several neural peptides and/or to cell interactions with the extracellular matrix. Andre and Becker-Andre (1993) cloned a cDNA for human PTK2 using PCR methods. They detected expression of PTK2 in all organs tested, with the highest levels in brain and the lowest levels in heart and skeletal muscle. Andre and Becker-Andre (1993) detected an additional transcript in the brain encoding an N-terminally truncated form of the protein.

[0869] Full details of the abovementioned studies are described in the following publications, the disclosure of which are hereby incorporated by reference:
[0870] ndre, E.; Becker-Andre, M.: Expression of an N-terminally truncated form of human focal adhesion kinase in brain. Biochem. Biophys. Res. Commun. 190: 140-147, 1993. PubMed ID: 8422239 2. Fiedorek, F. T., Jr.; Kay, E. S.: Mapping of the focal adhesion kinase (Fadk) gene to mouse chromosome 15 and human chromosome 8. Mammalian Genome 6: 123-126, 1995.

[0871] Further studies establishing the function and utilities of PTK2 are found in John Hopkins OMIM database record ID 600758, and in references numbered 144-147 listed hereinbelow.

[0872] Reference is now made to PTK2 BINDING SITE. PTK2 protein tyrosine kinase 2 (PTK2) is a host target gene of VGAM21, corresponding to VGAM21-HOST-TARGET GENE of FIG. 21A. PTK2 BINDING SITE is a host binding site found in the 3′ untranslated region of PTK2, corresponding to HOST BINDING SITE of FIG. 21A. FIG. 21D illustrates the complementarity of the nucleotide sequence of PTK2 BINDING SITE, designated SEQ ID:101, to the nucleotide sequence of VGAM21 RNA of FIG. 21A, designated SEQ ID:96.

[0873] Yet a further function of VGAM21 is therefore inhibition of PTK2 protein tyrosine kinase 2 (PTK2), a host gene which encodes a Enzyme that involves in intracellular signal transduction pathway and is a putative homolog of chicken focal adhesion associated kinase., as part of a novel viral mechanism used by Porcine adenovirus A for attacking a host. Accordingly, utilities of VGAM21 include diagnosis, prevention and treatment of viral infection by Porcine adenovirus A.

[0874] The function of PTK2 has been established by previous studies. Andre and Becker-Andre (1993) described focal adhesion kinase, also known as cytoplasmic protein-tyrosine kinase (PTK2), which lacks any significant homology with other kinases. See also 601212. It concentrates in the focal adhesions that form between cells growing in the presence of extracellular matrix constituents, such as fibronectin. PTK2 contains phosphotyrosine in growing BALB/c 3T3 cells but contains little or no phosphotyrosine in cells detached by trypsinization. The tyrosine-phosphorylated state is regained within minutes when the cells are replated and anchored onto fibronectin. PTK2 appears to be a major substrate for the Rous virus-encoded oncoprotein, pp60v-src (see 190090), which transforms and confers anchorage independence on chicken embryo fibroblasts. A marked increase in tyrosine phosphorylation of PTK2 is also observed after treatment of cells with cholecystokinin, bombesin, vasopressin, and endothelin. Thus, activation of PTK2 may be an important early step in cell growth and intracellular signal transduction pathways triggered in response to several neural peptides and/or to cell interactions with the extracellular matrix. Andre and Becker-Andre (1993) cloned a cDNA for human PTK2 using PCR methods. They detected expression of PTK2 in all organs tested, with the highest levels in brain and the lowest levels in heart and skeletal muscle. Andre and Becker-Andre (1993) detected an additional transcript in the brain encoding an N-terminally truncated form of the protein.

[0875] Full details of the abovementioned studies are described in the following publications, the disclosure of which are hereby incorporated by reference:
[0876] ndre, E.; Becker-Andre, M.: Expression of an N-terminally truncated form of human focal adhesion kinase in brain. Biochem. Biophys. Res. Commun. 190: 140-147, 1993. PubMed ID: 8422239 2. Fiedorek, F. T., Jr.; Kay, E. S.: Mapping of the focal adhesion kinase (Fadk) gene to mouse chromosome 15 and human chromosome 8. Mammalian Genome 6: 123-126, 1995.

[0877] Further studies establishing the function and utilities of PTK2 are found in John Hopkins OMIM database record ID 600758, and in references numbered 144-147 listed hereinbelow.

[0878] Reference is now made to PTK2 BINDING SITE. PTK2 protein tyrosine kinase 2 (PTK2) is a host target gene of VGAM21, corresponding to VGAM21-HOST-TARGET GENE of FIG. 21A. PTK2 BINDING SITE is a host binding site found in the 3′ untranslated region of PTK2, corresponding to HOST BINDING SITE of FIG. 21A. FIG. 21D illustrates the complementarity of the nucleotide sequence of PTK2 BINDING SITE, designated SEQ ID:101, to the nucleotide sequence of VGAM21 RNA of FIG. 21A, designated SEQ ID:96.

[0879] Yet a further function of VGAM21 is therefore inhibition of PTK2 protein tyrosine kinase 2 (PTK2), a host gene which encodes a Enzyme that involves in intracellular signal transduction pathway and is a putative homolog of chicken focal adhesion associated kinase., as part of a novel viral mechanism used by Porcine adenovirus A for attacking a host. Accordingly, utilities of VGAM21 include diagnosis, prevention and treatment of viral infection by Porcine adenovirus A.

[0880] The function of PTK2 has been established by previous studies. Andre and Becker-Andre (1993) described focal adhesion kinase, also known as cytoplasmic protein-tyrosine kinase (PTK2), which lacks any significant homology with other kinases. See also 601212. It concentrates in the focal adhesions that form between cells growing in the presence of extracellular matrix constituents, such as fibronectin. PTK2 contains phosphotyrosine in growing BALB/c 3T3 cells but contains little or no phosphotyrosine in cells detached by trypsinization. The tyrosine-phosphorylated state is regained within minutes when the cells are replated and anchored onto fibronectin. PTK2 appears to be a major substrate for the Rous virus-encoded oncoprotein, pp60v-src (see 190090), which transforms and confers anchorage independence on chicken embryo fibroblasts. A marked increase in tyrosine phosphorylation of PTK2 is also observed after treatment of cells with cholecystokinin, bombesin, vasopressin, and endothelin. Thus, activation of PTK2 may be an important early step in cell growth and intracellular signal transduction pathways triggered in response to several neural peptides and/or to cell interactions with the extracellular matrix. Andre and Becker-Andre (1993) cloned a cDNA for human PTK2 using PCR methods. They detected expression of PTK2 in all organs tested, with the highest levels in brain and the lowest levels in heart and skeletal muscle. Andre and Becker-Andre (1993) detected an additional transcript in the brain encoding an N-terminally truncated form of the protein.

[0881] Full details of the abovementioned studies are described in the following publications, the disclosure of which are hereby incorporated by reference:
[0882] ndre, E.; Becker-Andre, M.: Expression of an N-terminally truncated form of human focal adhesion kinase in brain. Biochem. Biophys. Res. Commun. 190: 140-147, 1993. PubMed ID: 8422239 2. Fiedorek, F. T., Jr.; Kay, E. S.: Mapping of the focal adhesion kinase (Fadk) gene to mouse chromosome 15 and human chromosome 8. Mammalian Genome 6: 123-126, 1995.

[0883] Further studies establishing the function and utilities of PTK2 are found in John Hopkins OMIM database record ID 600758, and in references numbered 144-147 listed hereinbelow.

[0884] Reference is now made to PTK2 BINDING SITE. PTK2 protein tyrosine kinase 2 (PTK2) is a host target gene of VGAM21, corresponding to VGAM21-HOST-TARGET GENE of FIG. 21A. PTK2 BINDING SITE is a host binding site found in the 3′ untranslated region of PTK2, corresponding to HOST BINDING SITE of FIG. 21A. FIG. 21D illustrates the complementarity of the nucleotide sequence of PTK2 BINDING SITE, designated SEQ ID:101, to the nucleotide sequence of VGAM21 RNA of FIG. 21A, designated SEQ ID:96.

[0885] Yet a further function of VGAM21 is therefore inhibition of PTK2 protein tyrosine kinase 2 (PTK2), a host gene which encodes a Enzyme that involves in intracellular signal transduction pathway and is a putative homolog of chicken focal adhesion associated kinase., as part of a novel viral mechanism used by Porcine adenovirus A for attacking a host. Accordingly, utilities of VGAM21 include diagnosis, prevention and treatment of viral infection by Porcine adenovirus A.

[0886] The function of PTK2 has been established by previous studies. Andre and Becker-Andre (1993) described focal adhesion kinase, also known as cytoplasmic protein-tyrosine kinase (PTK2), which lacks any significant homology with other kinases. See also 601212. It concentrates in the focal adhesions that form between cells growing in the presence of extracellular matrix constituents, such as fibronectin. PTK2 contains phosphotyrosine in growing BALB/c 3T3 cells but contains little or no phosphotyrosine in cells detached by trypsinization. The tyrosine-phosphorylated state is regained within minutes when the cells are replated and anchored onto fibronectin. PTK2 appears to be a major substrate for the Rous virus-encoded oncoprotein, pp60v-src (see 190090), which transforms and confers anchorage independence on chicken embryo fibroblasts. A marked increase in tyrosine phosphorylation of PTK2 is also observed after treatment of cells with cholecystokinin, bombesin, vasopressin, and endothelin. Thus, activation of PTK2 may be an important early step in cell growth and intracellular signal transduction pathways triggered in response to several neural peptides and/or to cell interactions with the extracellular matrix. Andre and Becker-Andre (1993) cloned a cDNA for human PTK2 using PCR methods. They detected expression of PTK2 in all organs tested, with the highest levels in brain and the lowest levels in heart and skeletal muscle. Andre and Becker-Andre (1993) detected an additional transcript in the brain encoding an N-terminally truncated form of the protein.

[0887] Full details of the abovementioned studies are described in the following publications, the disclosure of which are hereby incorporated by reference:
[0888] ndre, E.; Becker-Andre, M.: Expression of an N-terminally truncated form of human focal adhesion kinase in brain. Biochem. Biophys. Res. Commun. 190: 140-147, 1993. PubMed ID: 8422239 2. Fiedorek, F. T., Jr.; Kay, E. S.: Mapping of the focal adhesion kinase (Fadk) gene to mouse chromosome 15 and human chromosome 8. Mammalian Genome 6: 123-126, 1995.

[0889] Further studies establishing the function and utilities of PTK2 are found in John Hopkins OMIM database record ID 600758, and in references numbered 144-147 listed hereinbelow.

[0890] Reference is now made to PTK2 BINDING SITE. PTK2 protein tyrosine kinase 2 (PTK2) is a host target gene of VGAM21, corresponding to VGAM21-HOST-TARGET GENE of FIG. 21A. PTK2 BINDING SITE is a host binding site found in the 3′ untranslated region of PTK2, corresponding to HOST BINDING SITE of FIG. 21A. FIG. 21D illustrates the complementarity of the nucleotide sequence of PTK2 BINDING SITE, designated SEQ ID:101, to the nucleotide sequence of VGAM21 RNA of FIG. 21A, designated SEQ ID:96.

[0891] Yet a further function of VGAM21 is therefore inhibition of PTK2 protein tyrosine kinase 2 (PTK2), a host gene which encodes a Enzyme that involves in intracellular signal transduction pathway and is a putative homolog of chicken focal adhesion associated kinase., as part of a novel viral mechanism used by Porcine adenovirus A for attacking a host. Accordingly, utilities of VGAM21 include diagnosis, prevention and treatment of viral infection by Porcine adenovirus A.

[0892] The function of PTK2 has been established by previous studies. Andre and Becker-Andre (1993) described focal adhesion kinase, also known as cytoplasmic protein-tyrosine kinase (PTK2), which lacks any significant homology with other kinases. See also 601212. It concentrates in the focal adhesions that form between cells growing in the presence of extracellular matrix constituents, such as fibronectin. PTK2 contains phosphotyrosine in growing BALB/c 3T3 cells but contains little or no phosphotyrosine in cells detached by trypsinization. The tyrosine-phosphorylated state is regained within minutes when the cells are replated and anchored onto fibronectin. PTK2 appears to be a major substrate for the Rous virus-encoded oncoprotein, pp60v-src (see 190090), which transforms and confers anchorage independence on chicken embryo fibroblasts. A marked increase in tyrosine phosphorylation of PTK2 is also observed after treatment of cells with cholecystokinin, bombesin, vasopressin, and endothelin. Thus, activation of PTK2 may be an important early step in cell growth and intracellular signal transduction pathways triggered in response to several neural peptides and/or to cell interactions with the extracellular matrix. Andre and Becker-Andre (1993) cloned a cDNA for human PTK2 using PCR methods. They detected expression of PTK2 in all organs tested, with the highest levels in brain and the lowest levels in heart and skeletal muscle. Andre and Becker-Andre (1993) detected an additional transcript in the brain encoding an N-terminally truncated form of the protein.

[0893] Full details of the abovementioned studies are described in the following publications, the disclosure of which are hereby incorporated by reference:
[0894] ndre, E.; Becker-Andre, M.: Expression of an N-terminally truncated form of human focal adhesion kinase in brain. Biochem. Biophys. Res. Commun. 190: 140-147, 1993. PubMed ID: 8422239 2. Fiedorek, F. T., Jr.; Kay, E. S.: Mapping of the focal adhesion kinase (Fadk) gene to mouse chromosome 15 and human chromosome 8. Mammalian Genome 6: 123-126, 1995.

[0895] Further studies establishing the function and utilities of PTK2 are found in John Hopkins OMIM database record ID 600758, and in references numbered 144-147 listed hereinbelow.

[0896] Reference is now made to PTK2 BINDING SITE. PTK2 protein tyrosine kinase 2 (PTK2) is a host target gene of VGAM21, corresponding to VGAM21-HOST-TARGET GENE of FIG. 21A. PTK2 BINDING SITE is a host binding site found in the 3′ untranslated region of PTK2, corresponding to HOST BINDING SITE of FIG. 21A. FIG. 21D illustrates the complementarity of the nucleotide sequence of PTK2 BINDING SITE, designated SEQ ID:101, to the nucleotide sequence of VGAM21 RNA of FIG. 21A, designated SEQ ID:96.

[0897] Yet a further function of VGAM21 is therefore inhibition of PTK2 protein tyrosine kinase 2 (PTK2), a host gene which encodes a Enzyme that involves in intracellular signal transduction pathway and is a putative homolog of chicken focal adhesion associated kinase., as part of a novel viral mechanism used by Porcine adenovirus A for attacking a host. Accordingly, utilities of VGAM21 include diagnosis, prevention and treatment of viral infection by Porcine adenovirus A.

[0898] The function of PTK2 has been established by previous studies. Andre and Becker-Andre (1993) described focal adhesion kinase, also known as cytoplasmic protein-tyrosine kinase (PTK2), which lacks any significant homology with other kinases. See also 601212. It concentrates in the focal adhesions that form between cells growing in the presence of extracellular matrix constituents, such as fibronectin. PTK2 contains phosphotyrosine in growing BALB/c 3T3 cells but contains little or no phosphotyrosine in cells detached by trypsinization. The tyrosine-phosphorylated state is regained within minutes when the cells are replated and anchored onto fibronectin. PTK2 appears to be a major substrate for the Rous virus-encoded oncoprotein, pp60v-src (see 190090), which transforms and confers anchorage independence on chicken embryo fibroblasts. A marked increase in tyrosine phosphorylation of PTK2 is also observed after treatment of cells with cholecystokinin, bombesin, vasopressin, and endothelin. Thus, activation of PTK2 may be an important early step in cell growth and intracellular signal transduction pathways triggered in response to several neural peptides and/or to cell interactions with the extracellular matrix. Andre and Becker-Andre (1993) cloned a cDNA for human PTK2 using PCR methods. They detected expression of PTK2 in all organs tested, with the highest levels in brain and the lowest levels in heart and skeletal muscle. Andre and Becker-Andre (1993) detected an additional transcript in the brain encoding an N-terminally truncated form of the protein.

[0899] Full details of the abovementioned studies are described in the following publications, the disclosure of which are hereby incorporated by reference:
[0900] ndre, E.; Becker-Andre, M.: Expression of an N-terminally truncated form of human focal adhesion kinase in brain. Biochem. Biophys. Res. Commun. 190: 140-147, 1993. PubMed ID: 8422239 2. Fiedorek, F. T., Jr.; Kay, E. S.: Mapping of the focal adhesion kinase (Fadk) gene to mouse chromosome 15 and human chromosome 8. Mammalian Genome 6: 123-126, 1995.

[0901] Further studies establishing the function and utilities of PTK2 are found in John Hopkins OMIM database record ID 600758, and in references numbered 144-147 listed hereinbelow.

[0902] Reference is now made to PTK2 BINDING SITE. PTK2 protein tyrosine kinase 2 (PTK2) is a host target gene of VGAM21, corresponding to VGAM21-HOST-TARGET GENE of FIG. 21A. PTK2 BINDING SITE is a host binding site found in the 3′ untranslated region of PTK2, corresponding to HOST BINDING SITE of FIG. 21A. FIG. 21D illustrates the complementarity of the nucleotide sequence of PTK2 BINDING SITE, designated SEQ ID:101, to the nucleotide sequence of VGAM21 RNA of FIG. 21A, designated SEQ ID:96.

[0903] Yet a further function of VGAM21 is therefore inhibition of PTK2 protein tyrosine kinase 2 (PTK2), a host gene which encodes a Enzyme that involves in intracellular signal transduction pathway and is a putative homolog of chicken focal adhesion associated kinase., as part of a novel viral mechanism used by Porcine adenovirus A for attacking a host. Accordingly, utilities of VGAM21 include diagnosis, prevention and treatment of viral infection by Porcine adenovirus A.

[0904] The function of PTK2 has been established by previous studies. Andre and Becker-Andre (1993) described focal adhesion kinase, also known as cytoplasmic protein-tyrosine kinase (PTK2), which lacks any significant homology with other kinases. See also 601212. It concentrates in the focal adhesions that form between cells growing in the presence of extracellular matrix constituents, such as fibronectin. PTK2 contains phosphotyrosine in growing BALB/c 3T3 cells but contains little or no phosphotyrosine in cells detached by trypsinization. The tyrosine-phosphorylated state is regained within minutes when the cells are replated and anchored onto fibronectin. PTK2 appears to be a major substrate for the Rous virus-encoded oncoprotein, pp60v-src (see 190090), which transforms and confers anchorage independence on chicken embryo fibroblasts. A marked increase in tyrosine phosphorylation of PTK2 is also observed after treatment of cells with cholecystokinin, bombesin, vasopressin, and endothelin. Thus, activation of PTK2 may be an important early step in cell growth and intracellular signal transduction pathways triggered in response to several neural peptides and/or to cell interactions with the extracellular matrix. Andre and Becker-Andre (1993) cloned a cDNA for human PTK2 using PCR methods. They detected expression of PTK2 in all organs tested, with the highest levels in brain and the lowest levels in heart and skeletal muscle. Andre and Becker-Andre (1993) detected an additional transcript in the brain encoding an N-terminally truncated form of the protein.

[0905] Full details of the abovementioned studies are described in the following publications, the disclosure of which are hereby incorporated by reference:
[0906] ndre, E.; Becker-Andre, M.: Expression of an N-terminally truncated form of human focal adhesion kinase in brain. Biochem. Biophys. Res. Commun. 190: 140-147, 1993. PubMed ID: 8422239 2. Fiedorek, F. T., Jr.; Kay, E. S.: Mapping of the focal adhesion kinase (Fadk) gene to mouse chromosome 15 and human chromosome 8. Mammalian Genome 6: 123-126, 1995.

[0907] Further studies establishing the function and utilities of PTK2 are found in John Hopkins OMIM database record ID 600758, and in references numbered 144-147 listed hereinbelow.

[0908] Reference is now made to PTK2 BINDING SITE. PTK2 protein tyrosine kinase 2 (PTK2) is a host target gene of VGAM21, corresponding to VGAM21-HOST-TARGET GENE of FIG. 21A. PTK2 BINDING SITE is a host binding site found in the 3′ untranslated region of PTK2, corresponding to HOST BINDING SITE of FIG. 21A. FIG. 21D illustrates the complementarity of the nucleotide sequence of PTK2 BINDING SITE, designated SEQ ID:101, to the nucleotide sequence of VGAM21 RNA of FIG. 21A, designated SEQ ID:96.

[0909] Yet a further function of VGAM21 is therefore inhibition of PTK2 protein tyrosine kinase 2 (PTK2), a host gene which encodes a Enzyme that involves in intracellular signal transduction pathway and is a putative homolog of chicken focal adhesion associated kinase., as part of a novel viral mechanism used by Porcine adenovirus A for attacking a host. Accordingly, utilities of VGAM21 include diagnosis, prevention and treatment of viral infection by Porcine adenovirus A.

[0910] The function of PTK2 has been established by previous studies. Andre and Becker-Andre (1993) described focal adhesion kinase, also known as cytoplasmic protein-tyrosine kinase (PTK2), which lacks any significant homology with other kinases. See also 601212. It concentrates in the focal adhesions that form between cells growing in the presence of extracellular matrix constituents, such as fibronectin. PTK2 contains phosphotyrosine in growing BALB/c 3T3 cells but contains little or no phosphotyrosine in cells detached by trypsinization. The tyrosine-phosphorylated state is regained within minutes when the cells are replated and anchored onto fibronectin. PTK2 appears to be a major substrate for the Rous virus-encoded oncoprotein, pp60v-src (see 190090), which transforms and confers anchorage independence on chicken embryo fibroblasts. A marked increase in tyrosine phosphorylation of PTK2 is also observed after treatment of cells with cholecystokinin, bombesin, vasopressin, and endothelin. Thus, activation of PTK2 may be an important early step in cell growth and intracellular signal transduction pathways triggered in response to several neural peptides and/or to cell interactions with the extracellular matrix. Andre and Becker-Andre (1993) cloned a cDNA for human PTK2 using PCR methods. They detected expression of PTK2 in all organs tested, with the highest levels in brain and the lowest levels in heart and skeletal muscle. Andre and Becker-Andre (1993) detected an additional transcript in the brain encoding an N-terminally truncated form of the protein.

[0911] Full details of the abovementioned studies are described in the following publications, the disclosure of which are hereby incorporated by reference:
[0912] ndre, E.; Becker-Andre, M.: Expression of an N-terminally truncated form of human focal adhesion kinase in brain. Biochem. Biophys. Res. Commun. 190: 140-147, 1993. PubMed ID: 8422239 2. Fiedorek, F. T., Jr.; Kay, E. S.: Mapping of the focal adhesion kinase (Fadk) gene to mouse chromosome 15 and human chromosome 8. Mammalian Genome 6: 123-126, 1995.

[0913] Further studies establishing the function and utilities of PTK2 are found in John Hopkins OMIM database record ID 600758, and in references numbered 144-147 listed hereinbelow.

[0914] Reference is now made to PTK2 BINDING SITE. PTK2 protein tyrosine kinase 2 (PTK2) is a host target gene of VGAM21, corresponding to VGAM21-HOST-TARGET GENE of FIG. 21A. PTK2 BINDING SITE is a host binding site found in the 3′ untranslated region of PTK2, corresponding to HOST BINDING SITE of FIG. 21A. FIG. 21D illustrates the complementarity of the nucleotide sequence of PTK2 BINDING SITE, designated SEQ ID:101, to the nucleotide sequence of VGAM21 RNA of FIG. 21A, designated SEQ ID:96.

[0915] Yet a further function of VGAM21 is therefore inhibition of PTK2 protein tyrosine kinase 2 (PTK2), a host gene which encodes a Enzyme that involves in intracellular signal transduction pathway and is a putative homolog of chicken focal adhesion associated kinase., as part of a novel viral mechanism used by Porcine adenovirus A for attacking a host. Accordingly, utilities of VGAM21 include diagnosis, prevention and treatment of viral infection by Porcine adenovirus A.

[0916] The function of PTK2 has been established by previous studies. Andre and Becker-Andre (1993) described focal adhesion kinase, also known as cytoplasmic protein-tyrosine kinase (PTK2), which lacks any significant homology with other kinases. See also 601212. It concentrates in the focal adhesions that form between cells growing in the presence of extracellular matrix constituents, such as fibronectin. PTK2 contains phosphotyrosine in growing BALB/c 3T3 cells but contains little or no phosphotyrosine in cells detached by trypsinization. The tyrosine-phosphorylated state is regained within minutes when the cells are replated and anchored onto fibronectin. PTK2 appears to be a major substrate for the Rous virus-encoded oncoprotein, pp60v-src (see 190090), which transforms and confers anchorage independence on chicken embryo fibroblasts. A marked increase in tyrosine phosphorylation of PTK2 is also observed after treatment of cells with cholecystokinin, bombesin, vasopressin, and endothelin. Thus, activation of PTK2 may be an important early step in cell growth and intracellular signal transduction pathways triggered in response to several neural peptides and/or to cell interactions with the extracellular matrix. Andre and Becker-Andre (1993) cloned a cDNA for human PTK2 using PCR methods. They detected expression of PTK2 in all organs tested, with the highest levels in brain and the lowest levels in heart and skeletal muscle. Andre and Becker-Andre (1993) detected an additional transcript in the brain encoding an N-terminally truncated form of the protein.

[0917] Full details of the abovementioned studies are described in the following publications, the disclosure of which are hereby incorporated by reference:
[0918] ndre, E.; Becker-Andre, M.: Expression of an N-terminally truncated form of human focal adhesion kinase in brain. Biochem. Biophys. Res. Commun. 190: 140-147, 1993. PubMed ID: 8422239 2. Fiedorek, F. T., Jr.; Kay, E. S.: Mapping of the focal adhesion kinase (Fadk) gene to mouse chromosome 15 and human chromosome 8. Mammalian Genome 6: 123-126, 1995.

[0919] Further studies establishing the function and utilities of PTK2 are found in John Hopkins OMIM database record ID 600758, and in references numbered 144-147 listed hereinbelow.

[0920] Reference is now made to PTK2 BINDING SITE. PTK2 protein tyrosine kinase 2 (PTK2) is a host target gene of VGAM21, corresponding to VGAM21-HOST-TARGET GENE of FIG. 21A. PTK2 BINDING SITE is a host binding site found in the 3′ untranslated region of PTK2, corresponding to HOST BINDING SITE of FIG. 21A. FIG. 21D illustrates the complementarity of the nucleotide sequence of PTK2 BINDING SITE, designated SEQ ID:101, to the nucleotide sequence of VGAM21 RNA of FIG. 21A, designated SEQ ID:96.

[0921] Yet a further function of VGAM21 is therefore inhibition of PTK2 protein tyrosine kinase 2 (PTK2), a host gene which encodes a Enzyme that involves in intracellular signal transduction pathway and is a putative homolog of chicken focal adhesion associated kinase., as part of a novel viral mechanism used by Porcine adenovirus A for attacking a host. Accordingly, utilities of VGAM21 include diagnosis, prevention and treatment of viral infection by Porcine adenovirus A.

[0922] The function of PTK2 has been established by previous studies. Andre and Becker-Andre (1993) described focal adhesion kinase, also known as cytoplasmic protein-tyrosine kinase (PTK2), which lacks any significant homology with other kinases. See also 601212. It concentrates in the focal adhesions that form between cells growing in the presence of extracellular matrix constituents, such as fibronectin. PTK2 contains phosphotyrosine in growing BALB/c 3T3 cells but contains little or no phosphotyrosine in cells detached by trypsinization. The tyrosine-phosphorylated state is regained within minutes when the cells are replated and anchored onto fibronectin. PTK2 appears to be a major substrate for the Rous virus-encoded oncoprotein, pp60v-src (see 190090), which transforms and confers anchorage independence on chicken embryo fibroblasts. A marked increase in tyrosine phosphorylation of PTK2 is also observed after treatment of cells with cholecystokinin, bombesin, vasopressin, and endothelin. Thus, activation of PTK2 may be an important early step in cell growth and intracellular signal transduction pathways triggered in response to several neural peptides and/or to cell interactions with the extracellular matrix. Andre and Becker-Andre (1993) cloned a cDNA for human PTK2 using PCR methods. They detected expression of PTK2 in all organs tested, with the highest levels in brain and the lowest levels in heart and skeletal muscle. Andre and Becker-Andre (1993) detected an additional transcript in the brain encoding an N-terminally truncated form of the protein.

[0923] Full details of the abovementioned studies are described in the following publications, the disclosure of which are hereby incorporated by reference:
[0924] ndre, E.; Becker-Andre, M.: Expression of an N-terminally truncated form of human focal adhesion kinase in brain. Biochem. Biophys. Res. Commun. 190: 140-147, 1993. PubMed ID: 8422239 2. Fiedorek, F. T., Jr.; Kay, E. S.: Mapping of the focal adhesion kinase (Fadk) gene to mouse chromosome 15 and human chromosome 8. Mammalian Genome 6: 123-126, 1995.

[0925] Further studies establishing the function and utilities of PTK2 are found in John Hopkins OMIM database record ID 600758, and in references numbered 144-147 listed hereinbelow.

[0926] Reference is now made to PTK2 BINDING SITE. PTK2 protein tyrosine kinase 2 (PTK2) is a host target gene of VGAM21, corresponding to VGAM21-HOST-TARGET GENE of FIG. 21A. PTK2 BINDING SITE is a host binding site found in the 3′ untranslated region of PTK2, corresponding to HOST BINDING SITE of FIG. 21A. FIG. 21D illustrates the complementarity of the nucleotide sequence of PTK2 BINDING SITE, designated SEQ ID:101, to the nucleotide sequence of VGAM21 RNA of FIG. 21A, designated SEQ ID:96.

[0927] Yet a further function of VGAM21 is therefore inhibition of PTK2 protein tyrosine kinase 2 (PTK2), a host gene which encodes a Enzyme that involves in intracellular signal transduction pathway and is a putative homolog of chicken focal adhesion associated kinase., as part of a novel viral mechanism used by Porcine adenovirus A for attacking a host. Accordingly, utilities of VGAM21 include diagnosis, prevention and treatment of viral infection by Porcine adenovirus A.

[0928] The function of PTK2 has been established by previous studies. Andre and Becker-Andre (1993) described focal adhesion kinase, also known as cytoplasmic protein-tyrosine kinase (PTK2), which lacks any significant homology with other kinases. See also 601212. It concentrates in the focal adhesions that form between cells growing in the presence of extracellular matrix constituents, such as fibronectin. PTK2 contains phosphotyrosine in growing BALB/c 3T3 cells but contains little or no phosphotyrosine in cells detached by trypsinization. The tyrosine-phosphorylated state is regained within minutes when the cells are replated and anchored onto fibronectin. PTK2 appears to be a major substrate for the Rous virus-encoded oncoprotein, pp60v-src (see 190090), which transforms and confers anchorage independence on chicken embryo fibroblasts. A marked increase in tyrosine phosphorylation of PTK2 is also observed after treatment of cells with cholecystokinin, bombesin, vasopressin, and endothelin. Thus, activation of PTK2 may be an important early step in cell growth and intracellular signal transduction pathways triggered in response to several neural peptides and/or to cell interactions with the extracellular matrix. Andre and Becker-Andre (1993) cloned a cDNA for human PTK2 using PCR methods. They detected expression of PTK2 in all organs tested, with the highest levels in brain and the lowest levels in heart and skeletal muscle. Andre and Becker-Andre (1993) detected an additional transcript in the brain encoding an N-terminally truncated form of the protein.

[0929] Full details of the abovementioned studies are described in the following publications, the disclosure of which are hereby incorporated by reference:
[0930] ndre, E.; Becker-Andre, M.: Expression of an N-terminally truncated form of human focal adhesion kinase in brain. Biochem. Biophys. Res. Commun. 190: 140-147, 1993. PubMed ID: 8422239 2. Fiedorek, F. T., Jr.; Kay, E. S.: Mapping of the focal adhesion kinase (Fadk) gene to mouse chromosome 15 and human chromosome 8. Mammalian Genome 6: 123-126, 1995.

[0931] Further studies establishing the function and utilities of PTK2 are found in John Hopkins OMIM database record ID 600758, and in references numbered 144-147 listed hereinbelow.

[0932] Reference is now made to PTK2 BINDING SITE. PTK2 protein tyrosine kinase 2 (PTK2) is a host target gene of VGAM21, corresponding to VGAM21-HOST-TARGET GENE of FIG. 21A. PTK2 BINDING SITE is a host binding site found in the 3′ untranslated region of PTK2, corresponding to HOST BINDING SITE of FIG. 21A. FIG. 21D illustrates the complementarity of the nucleotide sequence of PTK2 BINDING SITE, designated SEQ ID:101, to the nucleotide sequence of VGAM21 RNA of FIG. 21A, designated SEQ ID:96.

[0933] Yet a further function of VGAM21 is therefore inhibition of PTK2 protein tyrosine kinase 2 (PTK2), a host gene which encodes a Enzyme that involves in intracellular signal transduction pathway and is a putative homolog of chicken focal adhesion associated kinase., as part of a novel viral mechanism used by Porcine adenovirus A for attacking a host. Accordingly, utilities of VGAM21 include diagnosis, prevention and treatment of viral infection by Porcine adenovirus A.

[0934] The function of PTK2 has been established by previous studies. Andre and Becker-Andre (1993) described focal adhesion kinase, also known as cytoplasmic protein-tyrosine kinase (PTK2), which lacks any significant homology with other kinases. See also 601212. It concentrates in the focal adhesions that form between cells growing in the presence of extracellular matrix constituents, such as fibronectin. PTK2 contains phosphotyrosine in growing BALB/c 3T3 cells but contains little or no phosphotyrosine in cells detached by trypsinization. The tyrosine-phosphorylated state is regained within minutes when the cells are replated and anchored onto fibronectin. PTK2 appears to be a major substrate for the Rous virus-encoded oncoprotein, pp60v-src (see 190090), which transforms and confers anchorage independence on chicken embryo fibroblasts. A marked increase in tyrosine phosphorylation of PTK2 is also observed after treatment of cells with cholecystokinin, bombesin, vasopressin, and endothelin. Thus, activation of PTK2 may be an important early step in cell growth and intracellular signal transduction pathways triggered in response to several neural peptides and/or to cell interactions with the extracellular matrix. Andre and Becker-Andre (1993) cloned a cDNA for human PTK2 using PCR methods. They detected expression of PTK2 in all organs tested, with the highest levels in brain and the lowest levels in heart and skeletal muscle. Andre and Becker-Andre (1993) detected an additional transcript in the brain encoding an N-terminally truncated form of the protein.

[0935] Full details of the abovementioned studies are described in the following publications, the disclosure of which are hereby incorporated by reference:
[0936] ndre, E.; Becker-Andre, M.: Expression of an N-terminally truncated form of human focal adhesion kinase in brain. Biochem. Biophys. Res. Commun. 190: 140-147, 1993. PubMed ID: 8422239 2. Fiedorek, F. T., Jr.; Kay, E. S.: Mapping of the focal adhesion kinase (Fadk) gene to mouse chromosome 15 and human chromosome 8. Mammalian Genome 6: 123-126, 1995.

[0937] Further studies establishing the function and utilities of PTK2 are found in John Hopkins OMIM database record ID 600758, and in references numbered 144-147 listed hereinbelow.

[0938] Reference is now made to FIG. 22A, which is a simplified diagram providing a conceptual explanation of the mode by which a novel bioinformatically detected viral gene, referred to here as Viral Genomic Address Messenger 22 (VGAM22) modulates expression of host target genes thereof, the function and utility of which host target genes is known in the art.

[0939] VGAM22 is a novel bioinformatically detected regulatory, non protein coding, viral micro RNA (miRNA) gene. The method by which VGAM22 was detected is described hereinabove with reference to FIGS. 2-8.

[0940] VGAM22 GENE is a viral gene contained in the genome of Porcine adenovirus A. VGAM22-HOST TARGET GENE is a human gene contained in the human genome.

[0941] VGAM22 GENE encodes a VGAM22 PRECURSOR RNA. Similar to other miRNA genes, and unlike most ordinary genes, the RNA transcribed by VGAM22, VGAM22 PRECURSOR RNA, does not encoded a protein.

[0942] VGAM22 PRECURSOR RNA folds onto itself, forming VGAM22 FOLDED PRECURSOR RNA. As FIG. 22 illustrates, VGAM22 FOLDED PRECURSOR RNA forms a ‘hairpin structure’, folding onto itself. As is well known in the art, this ‘hairpin structure’, is typical of RNA encoded by miRNA genes, and is due to the fact that the nucleotide sequence of the first half of the RNA encoded by a miRNA gene is an accurate or partial inversed-reversed sequence of the nucleotide sequence of the second half thereof. By “inversed-reversed” is meant a sequence which is reversed and wherein each nucleotide is replaced by a complimentary nucleotide, as is well known in the art (e.g. ATGGC is the inversed-reversed sequence of GCCAT).

[0943] An enzyme complex designated DICER COMPLEX, ‘dices’ the VGAM22 FOLDED PRECURSOR RNA into a single stranded ˜22 nt long RNA segment, designated VGAM22 RNA. As is known in the art, ‘dicing’ of a hairpin structured RNA precursor product into short a ˜22 nt RNA segment is catalyzed by an enzyme complex comprising an enzyme called Dicer together with other necessary proteins.

[0944] VGAM22-HOST TARGET GENE encodes a corresponding messenger RNA, designated VGAM22-HOST-TARGET RNA. VGAM22-HOST-TARGET RNA comprises three regions, as is typical of mRNA of a protein coding gene: a 5′ untranslated region, a protein coding region and a 3′ untranslated region, designated 5′UTR, PROTEIN CODING and 3′UTR respectively.

[0945] VGAM22 RNA binds complimentarily to a HOST BINDING SITE, located on an untranslated region of VGAM22-HOST-TARGET RNA. This complimentarily binding is due to the fact that the nucleotide sequence of VGAM22 RNA is an accurate or a partial inversed-reversed sequence of the nucleotide sequence of HOST BINDING SITE. It is appreciated that while FIG. 22A depicts the HOST BINDING SITE on the 3′UTR region, this is meant as an example only—the HOST BINDING SITE may be located on the 5′UTR region as well.

[0946] The complimentary binding of VGAM22 RNA to HOST BINDING SITE inhibits translation of VGAM22-HOST-TARGET RNA into VGAM22-HOST-TARGET PROTEIN. VGAM22-HOST-TARGET PROTEIN is therefore outlined by a broken line.

[0947] It is appreciated that VGAM22-HOST-TARGET GENE in fact represents a plurality of host target genes of VGAM22. The mRNA of each of this plurality of host target genes of VGAM22 comprises a HOST BINDING SITE, having a nucleotide sequence which is at least partly complementary to VGAM22 RNA, and which when bound by VGAM22 RNA causes inhibition of translation of one of a plurality of host target proteins of VGAM22. The plurality of host target genes of VGAM22 and their respective host binding sites, are described hereinbelow with reference to FIG. 22D.

[0948] It is appreciated by one skilled in the art that the mode of translational inhibition illustrated by FIG. 22A with specific reference to translational inhibition exerted by VGAM22 on one or more host target genes of VGAM22, is in fact common to other known miRNA genes. As mentioned hereinabove with reference to the background section, although a specific complimentary binding site has been demonstrated only for miRNA genes Lin-4 and Let-7, all other recently discovered miRNA genes are also believed by those skilled in the art to modulate expression of other genes by complimentary binding, although specific complimentary binding sites of these genes have not yet been found (Ruvkun G., ‘Perspective: Glimpses of a tiny RNA world’, Science 294, 779 (2001)).

[0949] It is further appreciated that a function of VGAM22 is inhibition of expression of host target genes, as part of a novel viral mechanism of attacking a host. Accordingly, utilities of VGAM22 include diagnosis, prevention and treatment of viral infection by Porcine adenovirus A.

[0950] Reference is now made to FIG. 22B which shows the nucleotide sequence of VGAM22 PRECURSOR RNA of FIG. 22A, designated SEQ ID:113, and a probable nucleotide sequence of VGAM22 RNA of FIG. 22A, designated SEQ ID:114. The nucleotide sequence of SEQ ID:114, which is highly likely (over 28%) to be identical or highly similar to that of VGAM22, is marked by an underline within the sequence of VGAM22 PRECURSOR RNA.

[0951] Reference is now made to FIG. 22C, which shows the secondary folding of VGAM22 PRECURSOR RNA, forming a ‘hairpin structure’ designated VGAM22 FOLDED PRECURSOR RNA, both of FIG. 22A. A probable (>28%) nucleotide sequence of VGAM22 RNA, designated SEQ ID:114 of FIG. 22B, is marked by an underline on VGAM22 FOLDED PRECURSOR RNA. It is appreciated that the complimentary base-paring is not perfect, with ‘bulges’, as is well known in the art with respect to the RNA folding of all known miRNA genes.

[0952] Reference is now made to FIG. 22D, which is a table showing binding sites found in untranslated regions of a plurality of host target genes of VGAM22, each binding site corresponding to HOST BINDING SITE of FIG. 22A, and their complementarity to SEQ ID:114, which is highly likely (>28%) to be identical or highly similar to the nucleotide sequence of VGAM22 RNA of FIG. 22A.

[0953] As mentioned hereinabove with reference to FIG. 22A a function of VGAM22 is inhibition of expression of host target genes, as part of a novel viral mechanism of attacking a host. Accordingly, utilities of VGAM22 include diagnosis, prevention and treatment of viral infection by Porcine adenovirus A. It is appreciated that specific functions, and accordingly utilities, of VGAM22 correlate with, and may be deduced from, the identity of the host target genes which VGAM22 binds and inhibits, and the function of these host target genes, as elaborated hereinbelow.

[0954] Reference is now made to MAP3K14 BINDING SITE. mitogen-activated protein kinase kinase kinase 14 (MAP3K14) is a host target gene of VGAM22, corresponding to VGAM22-HOST TARGET GENE of FIG. 22A. MAP3K14 BINDING SITE is a host binding site found in the 3′ untranslated region of MAP3K14, corresponding to HOST BINDING SITE of FIG. 22A. FIG. 22D illustrates the complementarity of the nucleotide sequence of MAP3K14 BINDING SITE, designated SEQ ID:115, to the nucleotide sequence of VGAM22 RNA of FIG. 22A, designated SEQ ID:114.

[0955] a function of VGAM22 is therefore inhibition of mitogen-activated protein kinase kinase kinase 14 (MAP3K14), a host gene which encodes a Enzyme that is involved in the activation of nf-kappa-b and its transcriptional activity. induces the processing of nf-kappa-b 2/p100. could act in a receptor-selective manner (by similarity), as part of a novel viral mechanism used by Porcine adenovirus A for attacking a host. Accordingly, utilities of VGAM22 include diagnosis, prevention and treatment of viral infection by Porcine adenovirus A.

[0956] The function of MAP3K14 has been established by previous studies. By functional analysis of NIK and a kinase-deficient NIK expressed in primary human cells and in inflamed rheumatoid arthritis tissue, Smith et al. (2001) showed that NIK has a selective role in signaling by the lymphotoxin-beta receptor (LTBR; 600979). They determined that NIK is not required for signaling in response to lipopolysaccharide, IL1, and TNFA and is not a generic IKK kinase

[0957] Animal model experiments lend further support to the function of MAP3K14. The alymphoplasia (aly) mutation of mouse is autosomal recessive and characterized by the systemic absence of lymph nodes and Peyer patches and disorganized splenic and thymic structures with immunodeficiency. Shinkura et al. (1999) cloned the mouse Nik gene and determined that a G-to-A transition leads to a gly855-to-arg substitution in the C terminus of the protein, causing alymphoplasia in aly/aly mice

[0958] It is appreciated that the abovementioned animal model for MAP3K14 is acknowledged by those skilled in the art as a scientifically valid animal model, as can be further appreciated from the publications sited hereinbelow.

[0959] Full details of the abovementioned studies are described in the following publications, the disclosure of which are hereby incorporated by reference:
[0960] Shinkura, R.; Kitada, K.; Matsuda, F.; Tashiro, K.; Ikuta, K.; Suzuki, M.; Kogishi, K.; Serikawa, T.; Honjo, T.: Alymphoplasia is caused by a point mutation in the mouse gene encoding Nf-kappa-b-inducing kinase. Nature Genet. 22: 74-77, 1999. PubMed ID: 10319865. Smith, C.; Andreakos, E.; Crawley, J. B.; Brennan, F. M.; Feldmann, M.; Foxwell, B. M. J.: NF-kappa-B-inducing kinase is dispensable for activation of NF-kappa-B in inflammatory settings but essential for lymphotoxin beta receptor activation of NF-kappa-B in primary human fibroblasts. J. Immun. 167: 5895-5903, 2001.

[0961] Further studies establishing the function and utilities of MAP3K14 are found in John Hopkins OMIM database record ID 604655, and in references numbered 148-154 listed hereinbelow.

[0962] Reference is now made to MAP3K14 BINDING SITE. mitogen-activated protein kinase kinase kinase 14 (MAP3K14) is a host target gene of VGAM22, corresponding to VGAM22-HOST TARGET GENE of FIG. 22A. MAP3K14 BINDING SITE is a host binding site found in the 3′ untranslated region of MAP3K14, corresponding to HOST BINDING SITE of FIG. 22A. FIG. 22D illustrates the complementarity of the nucleotide sequence of MAP3K14 BINDING SITE, designated SEQ ID:115, to the nucleotide sequence of VGAM22 RNA of FIG. 22A, designated SEQ ID:114.

[0963] a function of VGAM22 is therefore inhibition of mitogen-activated protein kinase kinase kinase 14 (MAP3K14), a host gene which encodes a Enzyme that is involved in the activation of nf-kappa-b and its transcriptional activity. induces the processing of nf-kappa-b 2/p100. could act in a receptor-selective manner (by similarity), as part of a novel viral mechanism used by Porcine adenovirus A for attacking a host. Accordingly, utilities of VGAM22 include diagnosis, prevention and treatment of viral infection by Porcine adenovirus A.

[0964] The function of MAP3K14 has been established by previous studies. By functional analysis of NIK and a kinase-deficient NIK expressed in primary human cells and in inflamed rheumatoid arthritis tissue, Smith et al. (2001) showed that NIK has a selective role in signaling by the lymphotoxin-beta receptor (LTBR; 600979). They determined that NIK is not required for signaling in response to lipopolysaccharide, ILL and TNFA and is not a generic IKK kinase

[0965] Animal model experiments lend further support to the function of MAP3K14. The alymphoplasia (aly) mutation of mouse is autosomal recessive and characterized by the systemic absence of lymph nodes and Peyer patches and disorganized splenic and thymic structures with immunodeficiency. Shinkura et al. (1999) cloned the mouse Nik gene and determined that a G-to-A transition leads to a gly855-to-arg substitution in the C terminus of the protein, causing alymphoplasia in aly/aly mice

[0966] It is appreciated that the abovementioned animal model for MAP3K14 is acknowledged by those skilled in the art as a scientifically valid animal model, as can be further appreciated from the publications sited hereinbelow.

[0967] Full details of the abovementioned studies are described in the following publications, the disclosure of which are hereby incorporated by reference:
[0968] Shinkura, R.; Kitada, K.; Matsuda, F.; Tashiro, K.; Ikuta, K.; Suzuki, M.; Kogishi, K.; Serikawa, T.; Honjo, T.: Alymphoplasia is caused by a point mutation in the mouse gene encoding Nf-kappa-b-inducing kinase. Nature Genet. 22: 74-77, 1999. PubMed ID: 10319865. Smith, C.; Andreakos, E.; Crawley, J. B.; Brennan, F. M.; Feldmann, M.; Foxwell, B. M. J.: NF-kappa-B-inducing kinase is dispensable for activation of NF-kappa-B in inflammatory settings but essential for lymphotoxin beta receptor activation of NF-kappa-B in primary human fibroblasts. J. Immun. 167: 5895-5903, 2001.

[0969] Further studies establishing the function and utilities of MAP3K14 are found in John Hopkins OMIM database record ID 604655, and in references numbered 148-154 listed hereinbelow.

[0970] Reference is now made to MAP3K14 BINDING SITE. mitogen-activated protein kinase kinase kinase 14 (MAP3K14) is a host target gene of VGAM22, corresponding to VGAM22-HOST TARGET GENE of FIG. 22A. MAP3K14 BINDING SITE is a host binding site found in the 3′ untranslated region of MAP3K14, corresponding to HOST BINDING SITE of FIG. 22A. FIG. 22D illustrates the complementarity of the nucleotide sequence of MAP3K14 BINDING SITE, designated SEQ ID:115, to the nucleotide sequence of VGAM22 RNA of FIG. 22A, designated SEQ ID:114.

[0971] a function of VGAM22 is therefore inhibition of mitogen-activated protein kinase kinase kinase 14 (MAP3K14), a host gene which encodes a Enzyme that is involved in the activation of nf-kappa-b and its transcriptional activity. induces the processing of nf-kappa-b 2/p100. could act in a receptor-selective manner (by similarity), as part of a novel viral mechanism used by Porcine adenovirus A for attacking a host. Accordingly, utilities of VGAM22 include diagnosis, prevention and treatment of viral infection by Porcine adenovirus A.

[0972] The function of MAP3K14 has been established by previous studies. By functional analysis of NIK and a kinase-deficient NIK expressed in primary human cells and in inflamed rheumatoid arthritis tissue, Smith et al. (2001) showed that NIK has a selective role in signaling by the lymphotoxin-beta receptor (LTBR; 600979). They determined that NIK is not required for signaling in response to lipopolysaccharide, ILL and TNFA and is not a generic IKK kinase

[0973] Animal model experiments lend further support to the function of MAP3K14. The alymphoplasia (aly) mutation of mouse is autosomal recessive and characterized by the systemic absence of lymph nodes and Peyer patches and disorganized splenic and thymic structures with immunodeficiency. Shinkura et al. (1999) cloned the mouse Nik gene and determined that a G-to-A transition leads to a gly855-to-arg substitution in the C terminus of the protein, causing alymphoplasia in aly/aly mice

[0974] It is appreciated that the abovementioned animal model for MAP3K14 is acknowledged by those skilled in the art as a scientifically valid animal model, as can be further appreciated from the publications sited hereinbelow.

[0975] Full details of the abovementioned studies are described in the following publications, the disclosure of which are hereby incorporated by reference:
[0976] Shinkura, R.; Kitada, K.; Matsuda, F.; Tashiro, K.; Ikuta, K.; Suzuki, M.; Kogishi, K.; Serikawa, T.; Honjo, T.: Alymphoplasia is caused by a point mutation in the mouse gene encoding Nf-kappa-b-inducing kinase. Nature Genet. 22: 74-77, 1999. PubMed ID: 10319865. Smith, C.; Andreakos, E.; Crawley, J. B.; Brennan, F. M.; Feldmann, M.; Foxwell, B. M. J.: NF-kappa-B-inducing kinase is dispensable for activation of NF-kappa-B in inflammatory settings but essential for lymphotoxin beta receptor activation of NF-kappa-B in primary human fibroblasts. J. Immun. 167: 5895-5903, 2001.

[0977] Further studies establishing the function and utilities of MAP3K14 are found in John Hopkins OMIM database record ID 604655, and in references numbered 148-154 listed hereinbelow.

[0978] Reference is now made to MAP3K14 BINDING SITE. mitogen-activated protein kinase kinase kinase 14 (MAP3K14) is a host target gene of VGAM22, corresponding to VGAM22-HOST TARGET GENE of FIG. 22A. MAP3K14 BINDING SITE is a host binding site found in the 3′ untranslated region of MAP3K14, corresponding to HOST BINDING SITE of FIG. 22A. FIG. 22D illustrates the complementarity of the nucleotide sequence of MAP3K14 BINDING SITE, designated SEQ ID:115, to the nucleotide sequence of VGAM22 RNA of FIG. 22A, designated SEQ ID:114.

[0979] a function of VGAM22 is therefore inhibition of mitogen-activated protein kinase kinase kinase 14 (MAP3K14), a host gene which encodes a Enzyme that is involved in the activation of nf-kappa-b and its transcriptional activity. induces the processing of nf-kappa-b 2/p100. could act in a receptor-selective manner (by similarity), as part of a novel viral mechanism used by Porcine adenovirus A for attacking a host. Accordingly, utilities of VGAM22 include diagnosis, prevention and treatment of viral infection by Porcine adenovirus A.

[0980] The function of MAP3K14 has been established by previous studies. By functional analysis of NIK and a kinase-deficient NIK expressed in primary human cells and in inflamed rheumatoid arthritis tissue, Smith et al. (2001) showed that NIK has a selective role in signaling by the lymphotoxin-beta receptor (LTBR; 600979). They determined that NIK is not required for signaling in response to lipopolysaccharide, ILL and TNFA and is not a generic IKK kinase

[0981] Animal model experiments lend further support to the function of MAP3K14. The alymphoplasia (aly) mutation of mouse is autosomal recessive and characterized by the systemic absence of lymph nodes and Peyer patches and disorganized splenic and thymic structures with immunodeficiency. Shinkura et al. (1999) cloned the mouse Nik gene and determined that a G-to-A transition leads to a gly855-to-arg substitution in the C terminus of the protein, causing alymphoplasia in aly/aly mice

[0982] It is appreciated that the abovementioned animal model for MAP3K14 is acknowledged by those skilled in the art as a scientifically valid animal model, as can be further appreciated from the publications sited hereinbelow.

[0983] Full details of the abovementioned studies are described in the following publications, the disclosure of which are hereby incorporated by reference:
[0984] Shinkura, R.; Kitada, K.; Matsuda, F.; Tashiro, K.; Ikuta, K.; Suzuki, M.; Kogishi, K.; Serikawa, T.; Honjo, T.: Alymphoplasia is caused by a point mutation in the mouse gene encoding Nf-kappa-b-inducing kinase. Nature Genet. 22: 74-77, 1999. PubMed ID: 10319865. Smith, C.; Andreakos, E.; Crawley, J. B.; Brennan, F. M.; Feldmann, M.; Foxwell, B. M. J.: NF-kappa-B-inducing kinase is dispensable for activation of NF-kappa-B in inflammatory settings but essential for lymphotoxin beta receptor activation of NF-kappa-B in primary human fibroblasts. J. Immun. 167: 5895-5903, 2001.

[0985] Further studies establishing the function and utilities of MAP3K14 are found in John Hopkins OMIM database record ID 604655, and in references numbered 148-154 listed hereinbelow.

[0986] Reference is now made to MAP3K14 BINDING SITE. mitogen-activated protein kinase kinase kinase 14 (MAP3K14) is a host target gene of VGAM22, corresponding to VGAM22-HOST TARGET GENE of FIG. 22A. MAP3K14 BINDING SITE is a host binding site found in the 3′ untranslated region of MAP3K14, corresponding to HOST BINDING SITE of FIG. 22A. FIG. 22D illustrates the complementarity of the nucleotide sequence of MAP3K14 BINDING SITE, designated SEQ ID:115, to the nucleotide sequence of VGAM22 RNA of FIG. 22A, designated SEQ ID:114.

[0987] a function of VGAM22 is therefore inhibition of mitogen-activated protein kinase kinase kinase 14 (MAP3K14), a host gene which encodes a Enzyme that is involved in the activation of nf-kappa-b and its transcriptional activity. induces the processing of nf-kappa-b 2/p100. could act in a receptor-selective manner (by similarity), as part of a novel viral mechanism used by Porcine adenovirus A for attacking a host. Accordingly, utilities of VGAM22 include diagnosis, prevention and treatment of viral infection by Porcine adenovirus A.

[0988] The function of MAP3K14 has been established by previous studies. By functional analysis of NIK and a kinase-deficient NIK expressed in primary human cells and in inflamed rheumatoid arthritis tissue, Smith et al. (2001) showed that NIK has a selective role in signaling by the lymphotoxin-beta receptor (LTBR; 600979). They determined that NIK is not required for signaling in response to lipopolysaccharide, ILL and TNFA and is not a generic IKK kinase

[0989] Animal model experiments lend further support to the function of MAP3K14. The alymphoplasia (aly) mutation of mouse is autosomal recessive and characterized by the systemic absence of lymph nodes and Peyer patches and disorganized splenic and thymic structures with immunodeficiency. Shinkura et al. (1999) cloned the mouse Nik gene and determined that a G-to-A transition leads to a gly855-to-arg substitution in the C terminus of the protein, causing alymphoplasia in aly/aly mice

[0990] It is appreciated that the abovementioned animal model for MAP3K14 is acknowledged by those skilled in the art as a scientifically valid animal model, as can be further appreciated from the publications sited hereinbelow.

[0991] Full details of the abovementioned studies are described in the following publications, the disclosure of which are hereby incorporated by reference:
[0992] Shinkura, R.; Kitada, K.; Matsuda, F.; Tashiro, K.; Ikuta, K.; Suzuki, M.; Kogishi, K.; Serikawa, T.; Honjo, T.: Alymphoplasia is caused by a point mutation in the mouse gene encoding Nf-kappa-b-inducing kinase. Nature Genet. 22: 74-77, 1999. PubMed ID: 10319865. Smith, C.; Andreakos, E.; Crawley, J. B.; Brennan, F. M.; Feldmann, M.; Foxwell, B. M. J.: NF-kappa-B-inducing kinase is dispensable for activation of NF-kappa-B in inflammatory settings but essential for lymphotoxin beta receptor activation of NF-kappa-B in primary human fibroblasts. J. Immun. 167: 5895-5903, 2001.

[0993] Further studies establishing the function and utilities of MAP3K14 are found in John Hopkins OMIM database record ID 604655, and in references numbered 148-154 listed hereinbelow.

[0994] Reference is now made to MAP3K14 BINDING SITE. mitogen-activated protein kinase kinase kinase 14 (MAP3K14) is a host target gene of VGAM22, corresponding to VGAM22-HOST TARGET GENE of FIG. 22A. MAP3K14 BINDING SITE is a host binding site found in the 3′ untranslated region of MAP3K14, corresponding to HOST BINDING SITE of FIG. 22A. FIG. 22D illustrates the complementarity of the nucleotide sequence of MAP3K14 BINDING SITE, designated SEQ ID:115, to the nucleotide sequence of VGAM22 RNA of FIG. 22A, designated SEQ ID:114.

[0995] a function of VGAM22 is therefore inhibition of mitogen-activated protein kinase kinase kinase 14 (MAP3K14), a host gene which encodes a Enzyme that is involved in the activation of nf-kappa-b and its transcriptional activity. induces the processing of nf-kappa-b 2/p100. could act in a receptor-selective manner (by similarity), as part of a novel viral mechanism used by Porcine adenovirus A for attacking a host. Accordingly, utilities of VGAM22 include diagnosis, prevention and treatment of viral infection by Porcine adenovirus A.

[0996] The function of MAP3K14 has been established by previous studies. By functional analysis of NIK and a kinase-deficient NIK expressed in primary human cells and in inflamed rheumatoid arthritis tissue, Smith et al. (2001) showed that NIK has a selective role in signaling by the lymphotoxin-beta receptor (LTBR; 600979). They determined that NIK is not required for signaling in response to lipopolysaccharide, ILL and TNFA and is not a generic IKK kinase

[0997] Animal model experiments lend further support to the function of MAP3K14. The alymphoplasia (aly) mutation of mouse is autosomal recessive and characterized by the systemic absence of lymph nodes and Peyer patches and disorganized splenic and thymic structures with immunodeficiency. Shinkura et al. (1999) cloned the mouse Nik gene and determined that a G-to-A transition leads to a gly855-to-arg substitution in the C terminus of the protein, causing alymphoplasia in aly/aly mice

[0998] It is appreciated that the abovementioned animal model for MAP3K14 is acknowledged by those skilled in the art as a scientifically valid animal model, as can be further appreciated from the publications sited hereinbelow.

[0999] Full details of the abovementioned studies are described in the following publications, the disclosure of which are hereby incorporated by reference:
[1000] Shinkura, R.; Kitada, K.; Matsuda, F.; Tashiro, K.; Ikuta, K.; Suzuki, M.; Kogishi, K.; Serikawa, T.; Honjo, T.: Alymphoplasia is caused by a point mutation in the mouse gene encoding Nf-kappa-b-inducing kinase. Nature Genet. 22: 74-77, 1999. PubMed ID: 10319865. Smith, C.; Andreakos, E.; Crawley, J. B.; Brennan, F. M.; Feldmann, M.; Foxwell, B. M. J.: NF-kappa-B-inducing kinase is dispensable for activation of NF-kappa-B in inflammatory settings but essential for lymphotoxin beta receptor activation of NF-kappa-B in primary human fibroblasts. J. Immun. 167: 5895-5903, 2001.

[1001] Further studies establishing the function and utilities of MAP3K14 are found in John Hopkins OMIM database record ID 604655, and in references numbered 148-154 listed hereinbelow.

[1002] Reference is now made to FIG. 23A, which is a simplified diagram providing a conceptual explanation of the mode by which a novel bioinformatically detected viral gene, referred to here as Viral Genomic Address Messenger 23 (VGAM23) modulates expression of host target genes thereof, the function and utility of which host target genes is known in the art.

[1003] VGAM23 is a novel bioinformatically detected regulatory, non protein coding, viral micro RNA (miRNA) gene. The method by which VGAM23 was detected is described hereinabove with reference to FIGS. 2-8.

[1004] VGAM23 GENE is a viral gene contained in the genome of Equine herpesvirus 2. VGAM23-HOST TARGET GENE is a human gene contained in the human genome.

[1005] VGAM23 GENE encodes a VGAM23 PRECURSOR RNA. Similar to other miRNA genes, and unlike most ordinary genes, the RNA transcribed by VGAM23, VGAM23 PRECURSOR RNA, does not encoded a protein.

[1006] VGAM23 PRECURSOR RNA folds onto itself, forming VGAM23 FOLDED PRECURSOR RNA. As FIG. 23 illustrates, VGAM23 FOLDED PRECURSOR RNA forms a ‘hairpin structure’, folding onto itself. As is well known in the art, this ‘hairpin structure’, is typical of RNA encoded by miRNA genes, and is due to the fact that the nucleotide sequence of the first half of the RNA encoded by a miRNA gene is an accurate or partial inversed-reversed sequence of the nucleotide sequence of the second half thereof. By “inversed-reversed” is meant a sequence which is reversed and wherein each nucleotide is replaced by a complimentary nucleotide, as is well known in the art (e.g. ATGGC is the inversed-reversed sequence of GCCAT).

[1007] An enzyme complex designated DICER COMPLEX, ‘dices’ the VGAM23 FOLDED PRECURSOR RNA into a single stranded ˜22 nt long RNA segment, designated VGAM23 RNA. As is known in the art, ‘dicing’ of a hairpin structured RNA precursor product into short a ˜22 nt RNA segment is catalyzed by an enzyme complex comprising an enzyme called Dicer together with other necessary proteins.

[1008] VGAM23-HOST TARGET GENE encodes a corresponding messenger RNA, designated VGAM23-HOST-TARGET RNA. VGAM23-HOST-TARGET RNA comprises three regions, as is typical of mRNA of a protein coding gene: a 5′ untranslated region, a protein coding region and a 3′ untranslated region, designated 5′UTR, PROTEIN CODING and 3′UTR respectively.

[1009] VGAM23 RNA binds complimentarily to a HOST BINDING SITE, located on an untranslated region of VGAM23-HOST-TARGET RNA. This complimentarily binding is due to the fact that the nucleotide sequence of VGAM23 RNA is an accurate or a partial inversed-reversed sequence of the nucleotide sequence of HOST BINDING SITE. It is appreciated that while FIG. 23A depicts the HOST BINDING SITE on the 3′UTR region, this is meant as an example only—the HOST BINDING SITE may be located on the 5′UTR region as well.

[1010] The complimentary binding of VGAM23 RNA to HOST BINDING SITE inhibits translation of VGAM23-HOST-TARGET RNA into VGAM23-HOST-TARGET PROTEIN. VGAM23-HOST-TARGET PROTEIN is therefore outlined by a broken line.

[1011] It is appreciated that VGAM23-HOST-TARGET GENE in fact represents a plurality of host target genes of VGAM23. The mRNA of each of this plurality of host target genes of VGAM23 comprises a HOST BINDING SITE, having a nucleotide sequence which is at least partly complementary to VGAM23 RNA, and which when bound by VGAM23 RNA causes inhibition of translation of one of a plurality of host target proteins of VGAM23. The plurality of host target genes of VGAM23 and their respective host binding sites, are described hereinbelow with reference to FIG. 23D.

[1012] It is appreciated by one skilled in the art that the mode of translational inhibition illustrated by FIG. 23A with specific reference to translational inhibition exerted by VGAM23 on one or more host target genes of VGAM23, is in fact common to other known miRNA genes. As mentioned hereinabove with reference to the background section, although a specific complimentary binding site has been demonstrated only for miRNA genes Lin-4 and Let-7, all other recently discovered miRNA genes are also believed by those skilled in the art to modulate expression of other genes by complimentary binding, although specific complimentary binding sites of these genes have not yet been found (Ruvkun G., ‘Perspective: Glimpses of a tiny RNA world’, Science 294, 779 (2001)).

[1013] It is further appreciated that a function of VGAM23 is inhibition of expression of host target genes, as part of a novel viral mechanism of attacking a host. Accordingly, utilities of VGAM23 include diagnosis, prevention and treatment of viral infection by Equine herpesvirus 2.

[1014] Reference is now made to FIG. 23B which shows the nucleotide sequence of VGAM23 PRECURSOR RNA of FIG. 23A, designated SEQ ID:121, and a probable nucleotide sequence of VGAM23 RNA of FIG. 23A, designated SEQ ID:122. The nucleotide sequence of SEQ ID:122, which is highly likely (over 28%) to be identical or highly similar to that of VGAM23, is marked by an underline within the sequence of VGAM23 PRECURSOR RNA.

[1015] Reference is now made to FIG. 23C, which shows the secondary folding of VGAM23 PRECURSOR RNA, forming a ‘hairpin structure’ designated VGAM23 FOLDED PRECURSOR RNA, both of FIG. 23A. A probable (>28%) nucleotide sequence of VGAM23 RNA, designated SEQ ID:122 of FIG. 23B, is marked by an underline on VGAM23 FOLDED PRECURSOR RNA. It is appreciated that the complimentary base-paring is not perfect, with ‘bulges’, as is well known in the art with respect to the RNA folding of all known miRNA genes.

[1016] Reference is now made to FIG. 23D, which is a table showing binding sites found in untranslated regions of a plurality of host target genes of VGAM23, each binding site corresponding to HOST BINDING SITE of FIG. 23A, and their complementarity to SEQ ID:122, which is highly likely (>28%) to be identical or highly similar to the nucleotide sequence of VGAM23 RNA of FIG. 23A.

[1017] As mentioned hereinabove with reference to FIG. 23A a function of VGAM23 is inhibition of expression of host target genes, as part of a novel viral mechanism of attacking a host. Accordingly, utilities of VGAM23 include diagnosis, prevention and treatment of viral infection by Equine herpesvirus 2. It is appreciated that specific functions, and accordingly utilities, of VGAM23 correlate with, and may be deduced from, the identity of the host target genes which VGAM23 binds and inhibits, and the function of these host target genes, as elaborated hereinbelow.

[1018] Reference is now made to ATP11A BINDING SITE. ATPase, Class VI, type 11A (ATP11A) is a host target gene of VGAM23, corresponding to VGAM23-HOST-TARGET GENE of FIG. 23A. ATP11A BINDING SITE is a host binding site found in the 3′ untranslated region of ATP11A, corresponding to HOST BINDING SITE of FIG. 23A. FIG. 23D illustrates the complementarity of the nucleotide sequence of ATP11A BINDING SITE, designated SEQ ID:123, to the nucleotide sequence of VGAM23 RNA of FIG. 23A, designated SEQ ID:122.

[1019] a function of VGAM23 is therefore inhibition of ATPase, Class VI, type 11A (ATP11A), a host gene which encodes a Enzyme that is phosphorylated in their intermediate state, drives uphill transport of ions across membranes., as part of a novel viral mechanism used by Equine herpesvirus 2 for attacking a host. Accordingly, utilities of VGAM23 include diagnosis, prevention and treatment of viral infection by Equine herpesvirus 2.

[1020] The function of ATP11A has been established by previous studies. Kikuno et al. (1999) isolated a partial cDNA encoding ATP11A, which they called KIAA1021, from a brain cDNA library. Based on homology analysis, they predicted that the KIAA1021 protein is a probable calcium-transporting ATPase. RT-PCR analysis detected wide but moderate expression, with lowest levels in spleen, pancreas, testis, and most brain regions.

[1021] Full details of the abovementioned studies are described in the following publications, the disclosure of which are hereby incorporated by reference:
[1022] ikuno, R.; Nagase, T.; Ishikawa, K.; Hirosawa, M.; Miyajima, N.; Tanaka, A.; Kotani, H.; Nomura, N.; Ohara, O.: Prediction of the coding sequences of unidentified human genes. XIV. The complete sequences of 100 new cDNA clones from brain which code for large proteins in vitro. DNA Res. 6: 197-205, 1999.

[1023] Further studies establishing the function and utilities of ATP11A are found in John Hopkins OMIM database record ID 605868, and in references numbered 155-156 listed hereinbelow.

[1024] Reference is now made to BCL2L2 BINDING SITE. BCL2-like 2 (BCL2L2) is a host target gene of VGAM23, corresponding to VGAM23-HOST TARGET GENE of FIG. 23A. BCL2L2 BINDING SITE is a host binding site found in the 3′ untranslated region of BCL2L2, corresponding to HOST BINDING SITE of FIG. 23A. FIG. 23D illustrates the complementarity of the nucleotide sequence of BCL2L2 BINDING SITE, designated SEQ ID:124, to the nucleotide sequence of VGAM23 RNA of FIG. 23A, designated SEQ ID:122.

[1025] Yet another function of VGAM23 is therefore inhibition of BCL2-like 2 (BCL2L2), a host gene which encodes a Protein that promotes cell survival, as part of a novel viral mechanism used by Equine herpesvirus 2 for attacking a host. Accordingly, utilities of VGAM23 include diagnosis, prevention and treatment of viral infection by Equine herpesvirus 2.

[1026] The function of BCL2L2 has been established by previous studies. Gibson et al. (1996) used degenerate PCR to clone a novel BCL2 homolog which they denoted BCLW. The gene encodes a 193-amino acid polypeptide. Gibson et al. (1996) also isolated the mouse BCLW gene; its amino acid sequence is 99% identical to that of the human gene. Mouse BCLW is expressed as a 3.7-kb mRNA in a variety of tissues, with highest expression in brain, colon, and salivary gland. In mouse hematopoietic cell lines, BCLW is expressed in myeloid cells and to a lesser extent in lymphoid cells. Like BCL2, expressed BCLW promotes cell survival under a variety of cytotoxic conditions. Gibson et al. (1996) used fluorescence in situ hybridization to map the BCLW gene to human chromosome 14q11.2-q12.

[1027] Animal model experiments lend further support to the function of BCL2L2. To identify genes required for mammalian spermatogenesis, Ross et al. (1998) screened lines of mutant mice created using a retroviral gene-trap system for male infertility. Homozygous ROSA41 male mice exhibited sterility associated with progressive testicular degeneration. Germ cell defects were first observed at 19 days postnatal. Spermatogenesis was blocked during late spermiogenesis in young adults. Gradual depletion of all stages of germ cells resulted in a Sertoli-cell-only phenotype by approximately 6 months of age. Subsequently, almost all Sertoli cells were lost from the seminiferous tubules, and the Leydig cell population was reduced. Molecular analysis indicated that the gene mutated in these mice is BCLW, a death-protecting member of the Bcl2 family. The mutant allele of Bclw in ROSA41 did not produce a Bclw polypeptide. Expression of Bclw in the testis appeared to be restricted to elongating spermatids and Sertoli cells.

[1028] It is appreciated that the abovementioned animal model for BCL2L2 is acknowledged by those skilled in the art as a scientifically valid animal model, as can be further appreciated from the publications sited hereinbelow.

[1029] Full details of the abovementioned studies are described in the following publications, the disclosure of which are hereby incorporated by reference:
[1030] ibson, L.; Holmgreen, S. P.; Huang, D. C. S.; Bernard, O.; Copeland, N. G.; Jenkins, N. A.; Sutherland, G. R.; Baker, E.; Adams, J. M.; Cory, S.: bcl-w, a novel member of the bcl-2 family, promotes cell survival. Oncogene 13: 665-675, 1996. PubMed ID: 8761287 2. Ross, A. J.; Waymire, K. G.; Moss, J. E.; Parlow, A. F.; Skinner, M. K.; Russell, L. D.; MacGregor, G. R.: Testicular degeneration in Bclw-deficient mice. Nature Genet. 18: 251-256, 1998.

[1031] Further studies establishing the function and utilities of BCL2L2 are found in John Hopkins OMIM database record ID 601931, and in references numbered 157-158 listed hereinbelow.

[1032] Reference is now made to CLNS1A BINDING SITE. chloride channel, nucleotide-sensitive, 1A (CLNS1A) is a host target gene of VGAM23, corresponding to VGAM23-HOST-TARGET GENE of FIG. 23A. CLNS1A BINDING SITE is a host binding site found in the 3′ untranslated region of CLNS1A, corresponding to HOST BINDING SITE of FIG. 23A. FIG. 23D illustrates the complementarity of the nucleotide sequence of CLNS1A BINDING SITE, designated SEQ ID:125, to the nucleotide sequence of VGAM23 RNA of FIG. 23A, designated SEQ ID:122.

[1033] An additional function of VGAM23 is therefore inhibition of chloride channel, nucleotide-sensitive, 1A (CLNS1A), a host gene which encodes a Protein that may participate in cellular volume control, as part of a novel viral mechanism used by Equine herpesvirus 2 for attacking a host. Accordingly, utilities of VGAM23 include diagnosis, prevention and treatment of viral infection by Equine herpesvirus 2.

[1034] The function of CLNS1A has been established by previous studies. Anguita et al. (1995) cloned a novel gene encoding the chloride channel I(Cln) from a human ocular ciliary epithelial cell cDNA library. The gene encodes a 237-amino acid polypeptide that is over 90% identical to rat and canine I(Cln). The predicted protein contains 4 putative transmembrane domains. By Northern blot analysis, Nagl et al. (1996) found that the gene is expressed as an approximately 1.7-kb message in a variety of human tissues. Nagl et al. (1996) cloned the genomic DNA of the CLNS1A gene and showed that the gene comprises several exons spanning 19 kb of the genome. Schwartz et al. (1997) cloned I(Cln) from human reticulocyte cDNA. I(Cln) protein from red blood cell ghost membranes migrated as 2 bands, 37 and 43 kD, on SDS-PAGE. Schwartz et al. (1997) immunolocalized I(Cln) to the red blood cell membrane and, by the yeast 2-hybrid system, demonstrated that it formed stable complexes with beta-actin (102630). The authors suggested that I(Cln) is involved in chloride transport and volume regulation in red blood cells.

[1035] Full details of the abovementioned studies are described in the following publications, the disclosure of which are hereby incorporated by reference:
[1036] nguita, J.; Chalfant, M. L.; Civan, M. M.; Coca-Prados, M.: Molecular cloning of the human volume-sensitive chloride conductance regulatory protein, pI(Cln), from ocular ciliary epithelium. Biochem. Biophys. Res. Commun. 208: 89-95, 1995. PubMed ID: 7887970 2. Buyse, G.; De Greef, C.; Raeymaekers, L.; Droogmans, G.; Nilius, B.; Eggermont, J.: The ubiquitously expressed pI(Cln) protein forms homomeric complexes in vitro. Biochem. Biophys. Res. Commun. 218: 822-827, 1996.

[1037] Further studies establishing the function and utilities of CLNS1A are found in John Hopkins OMIM database record ID 602158, and in references numbered 159-162 listed hereinbelow.

[1038] Reference is now made to DMD BINDING SITE. dystrophin (muscular dystrophy, Duchenne and Becker types), includes D (DMD) is a host target gene of VGAM23, corresponding to VGAM23-HOST TARGET GENE of FIG. 23A. DMD BINDING SITE is a host binding site found in the 3′ untranslated region of DMD, corresponding to HOST BINDING SITE of FIG. 23A. FIG. 23D illustrates the complementarity of the nucleotide sequence of DMD BINDING SITE, designated SEQ ID:126, to the nucleotide sequence of VGAM23 RNA of FIG. 23A, designated SEQ ID:122.

[1039] A further function of VGAM23 is therefore inhibition of dystrophin (muscular dystrophy, Duchenne and Becker types), includes D (DMD), a host gene which encodes a Protein that is associated with duchenne muscular dystrophy (dmd) and becker muscular dystrophy, as part of a novel viral mechanism used by Equine herpesvirus 2 for attacking a host. Accordingly, utilities of VGAM23 include diagnosis, prevention and treatment of viral infection by Equine herpesvirus 2.

[1040] The function of DMD has been established by previous studies. Roberts et al. (1992) described a general approach to the identification of the basic defect in the one-third of DMD patients who do not show a gross rearrangement of the dystrophin gene. The method involved nested amplification, chemical mismatched detection, and sequencing of reverse transcripts of trace amounts of dystrophin mRNA from peripheral blood lymphocytes. Analysis of the entire coding region (11 kb) in 7 patients resulted in detection of a sequence change in each case that was clearly sufficient to cause the disease. All the mutations were expected to cause premature translation termination, and the resulting phenotypes were thus equivalent to those caused by frameshifting deletions; see 300377.0003-300377.0009. Deletions and point mutations in the DMD gene cause either DMD or the milder Becker muscular dystrophy, depending on whether the translational reading frame is lost or maintained. De Angelis et al. (2002) reasoned that because internal in-frame deletions in the protein produce only mild myopathic symptoms, a partially corrected phenotype could be restored by preventing the inclusion of specific mutated exons in the mature dystrophin mRNA. Such control had previously been accomplished by the use of synthetic oligonucleotides. To circumvent the disadvantageous necessity for periodic administration of the synthetic oligonucleotides, De Angelis et al. (2002) produced several constructs able to express in vivo, in a stable fashion, large amounts of chimeric RNAs containing antisense sequences. They showed that antisense molecules against exon 51 splice junctions were able to direct skipping of that exon in the human DMD deletion 48-50 and to rescue dystrophin synthesis. They also showed that the highest skipping activity occurred when antisense constructs against the 5-prime and 3-prime splice sites were coexpressed in the same cell. The effects were tested in cultured myoblasts from a DMD patient. The deletion of exons 48-50 resulted in a premature termination codon in exon 51. The antisense sequences complementary to exon 51 splice junctions induced efficient skipping of exon 51 and partial rescue of dystrophin synthesis. X-linked dilated cardiomyopathy is a dystrophinopathy characterized by severe cardiomyopathy with no skeletal muscle involvement. Several XLCM patients have been described with mutations that abolish dystrophin muscle isoform expression, but with increased expression of brain and cerebellar Purkinje isoforms of the gene exclusively in the skeletal muscle. Bastianutto et al. (2001) determined that 2 XLCM patients bore deletions that removed the muscle promoter and exon 1, but not the brain and cerebellar Purkinje promoters. The brain and cerebellar Purkinje promoters were found to be essentially inactive in muscle cell lines and primary cultures. Since dystrophin muscle enhancer 1 (DME1), a muscle-specific enhancer, is preserved in these patients, the authors tested its ability to upregulate the brain and cerebellar Purkinje promoters in muscle cells. Brain and cerebellar Purkinje promoter activity was significantly increased in the presence of DME1, and activation was observed exclusively in cells presenting a skeletal muscle phenotype versus cardiomyocytes. The authors suggested a role for DME1 in the induction of brain and cerebellar Purkinje isoform expression in the skeletal muscle of XLCM patients defective for muscle isoform expression.

[1041] Animal model experiments lend further support to the function of DMD. Using DNA microarray, Porter et al. (2002) established a molecular signature of dystrophinopathy in the mdx mouse. In leg muscle, 242 differentially expressed genes were identified. Data provided evidence for coordinated activity of numerous components of a chronic inflammatory response, including cytokine and chemokine signaling, leukocyte adhesion and diapedesis, invasive cell type-specific markers, and complement system activation. Upregulation of secreted phosphoprotein 1 (SPP1; 166490) mRNA and protein in dystrophic muscle identified a novel linkage between inflammatory cells and repair processes. Extracellular matrix genes were upregulated in mdx to levels similar to those in DMD. Since, unlike DMD, mdx exhibits little fibrosis, data suggested that collagen regulation at posttranscriptional stages may mediate extensive fibrosis in DMD.

[1042] It is appreciated that the abovementioned animal model for DMD is acknowledged by those skilled in the art as a scientifically valid animal model, as can be further appreciated from the publications sited hereinbelow.

[1043] Full details of the abovementioned studies are described in the following publications, the disclosure of which are hereby incorporated by reference:
[1044] De Angelis, F. G.; Sthandier, O.; Berarducci, B.; Toso, S.; Galluzzi, G.; Ricci, E.; Cossu, G.; Bozzoni, I.: Chimeric snRNA molecules carrying antisense sequences against the splice junctions of exon 51 of the dystrophin pre-mRNA induce exon skipping and restoration of a dystrophin synthesis in delta-48-50 DMD cells. Proc Nat. Acad. Sci. 99: 9456-9461, 2002. PubMed ID: 12077324 14. Bastianutto, C.; Bestard, J. A.; Lahnakoski, K.; Broere, D.; De Visser, M.; Zaccolo, M.; Pozzan, T.; Ferlini, A.; Muntoni, F.; Patarnello, T.; Klamut, H. J.: Dystrophin muscle enhancer 1 is implicated in the activation of non-muscle isoforms in the skeletal muscle of patients with X-linked dilated cardiomyopathy. Hum. Molec. Genet. 10: 2627-2635, 2001.

[1045] Further studies establishing the function and utilities of DMD are found in John Hopkins OMIM database record ID 300377, and in references numbered 163-261 listed hereinbelow.

[1046] Reference is now made to DMD BINDING SITE. dystrophin (muscular dystrophy, Duchenne and Becker types), includes D (DMD) is a host target gene of VGAM23, corresponding to VGAM23-HOST TARGET GENE of FIG. 23A. DMD BINDING SITE is a host binding site found in the 3′ untranslated region of DMD, corresponding to HOST BINDING SITE of FIG. 23A. FIG. 23D illustrates the complementarity of the nucleotide sequence of DMD BINDING SITE, designated SEQ ID:126, to the nucleotide sequence of VGAM23 RNA of FIG. 23A, designated SEQ ID:122.

[1047] Yet a further function of VGAM23 is therefore inhibition of dystrophin (muscular dystrophy, Duchenne and Becker types), includes D (DMD), a host gene which encodes a Protein that is associated with duchenne muscular dystrophy (dmd) and becker muscular dystrophy, as part of a novel viral mechanism used by Equine herpesvirus 2 for attacking a host. Accordingly, utilities of VGAM23 include diagnosis, prevention and treatment of viral infection by Equine herpesvirus 2.

[1048] The function of DMD has been established by previous studies. Roberts et al. (1992) described a general approach to the identification of the basic defect in the one-third of DMD patients who do not show a gross rearrangement of the dystrophin gene. The method involved nested amplification, chemical mismatched detection, and sequencing of reverse transcripts of trace amounts of dystrophin mRNA from peripheral blood lymphocytes. Analysis of the entire coding region (11 kb) in 7 patients resulted in detection of a sequence change in each case that was clearly sufficient to cause the disease. All the mutations were expected to cause premature translation termination, and the resulting phenotypes were thus equivalent to those caused by frameshifting deletions; see 300377.0003-300377.0009. Deletions and point mutations in the DMD gene cause either DMD or the milder Becker muscular dystrophy, depending on whether the translational reading frame is lost or maintained. De Angelis et al. (2002) reasoned that because internal in-frame deletions in the protein produce only mild myopathic symptoms, a partially corrected phenotype could be restored by preventing the inclusion of specific mutated exons in the mature dystrophin mRNA. Such control had previously been accomplished by the use of synthetic oligonucleotides. To circumvent the disadvantageous necessity for periodic administration of the synthetic oligonucleotides, De Angelis et al. (2002) produced several constructs able to express in vivo, in a stable fashion, large amounts of chimeric RNAs containing antisense sequences. They showed that antisense molecules against exon 51 splice junctions were able to direct skipping of that exon in the human DMD deletion 48-50 and to rescue dystrophin synthesis. They also showed that the highest skipping activity occurred when antisense constructs against the 5-prime and 3-prime splice sites were coexpressed in the same cell. The effects were tested in cultured myoblasts from a DMD patient. The deletion of exons 48-50 resulted in a premature termination codon in exon 51. The antisense sequences complementary to exon 51 splice junctions induced efficient skipping of exon 51 and partial rescue of dystrophin synthesis. X-linked dilated cardiomyopathy is a dystrophinopathy characterized by severe cardiomyopathy with no skeletal muscle involvement. Several XLCM patients have been described with mutations that abolish dystrophin muscle isoform expression, but with increased expression of brain and cerebellar Purkinje isoforms of the gene exclusively in the skeletal muscle. Bastianutto et al. (2001) determined that 2 XLCM patients bore deletions that removed the muscle promoter and exon 1, but not the brain and cerebellar Purkinje promoters. The brain and cerebellar Purkinje promoters were found to be essentially inactive in muscle cell lines and primary cultures. Since dystrophin muscle enhancer 1 (DME1), a muscle-specific enhancer, is preserved in these patients, the authors tested its ability to upregulate the brain and cerebellar Purkinje promoters in muscle cells. Brain and cerebellar Purkinje promoter activity was significantly increased in the presence of DME1, and activation was observed exclusively in cells presenting a skeletal muscle phenotype versus cardiomyocytes. The authors suggested a role for DME1 in the induction of brain and cerebellar Purkinje isoform expression in the skeletal muscle of XLCM patients defective for muscle isoform expression.

[1049] Animal model experiments lend further support to the function of DMD. Using DNA microarray, Porter et al. (2002) established a molecular signature of dystrophinopathy in the mdx mouse. In leg muscle, 242 differentially expressed genes were identified. Data provided evidence for coordinated activity of numerous components of a chronic inflammatory response, including cytokine and chemokine signaling, leukocyte adhesion and diapedesis, invasive cell type-specific markers, and complement system activation. Upregulation of secreted phosphoprotein 1 (SPP1; 166490) mRNA and protein in dystrophic muscle identified a novel linkage between inflammatory cells and repair processes. Extracellular matrix genes were upregulated in mdx to levels similar to those in DMD. Since, unlike DMD, mdx exhibits little fibrosis, data suggested that collagen regulation at posttranscriptional stages may mediate extensive fibrosis in DMD.

[1050] It is appreciated that the abovementioned animal model for DMD is acknowledged by those skilled in the art as a scientifically valid animal model, as can be further appreciated from the publications sited hereinbelow.

[1051] Full details of the abovementioned studies are described in the following publications, the disclosure of which are hereby incorporated by reference:
[1052] De Angelis, F. G.; Sthandier, O.; Berarducci, B.; Toso, S.; Galluzzi, G.; Ricci, E.; Cossu, G.; Bozzoni, I.: Chimeric snRNA molecules carrying antisense sequences against the splice junctions of exon 51 of the dystrophin pre-mRNA induce exon skipping and restoration of a dystrophin synthesis in delta-48-50 DMD cells. Proc Nat. Acad. Sci. 99: 9456-9461, 2002. PubMed ID: 12077324 14. Bastianutto, C.; Bestard, J. A.; Lahnakoski, K.; Broere, D.; De Visser, M.; Zaccolo, M.; Pozzan, T.; Ferlini, A.; Muntoni, F.; Patarnello, T.; Klamut, H. J.: Dystrophin muscle enhancer 1 is implicated in the activation of non-muscle isoforms in the skeletal muscle of patients with X-linked dilated cardiomyopathy. Hum. Molec. Genet. 10: 2627-2635, 2001.

[1053] Further studies establishing the function and utilities of DMD are found in John Hopkins OMIM database record ID 300377, and in references numbered 163-261 listed hereinbelow.

[1054] Reference is now made to DMD BINDING SITE. dystrophin (muscular dystrophy, Duchenne and Becker types), includes D (DMD) is a host target gene of VGAM23, corresponding to VGAM23-HOST TARGET GENE of FIG. 23A. DMD BINDING SITE is a host binding site found in the 3′ untranslated region of DMD, corresponding to HOST BINDING SITE of FIG. 23A. FIG. 23D illustrates the complementarity of the nucleotide sequence of DMD BINDING SITE, designated SEQ ID:126, to the nucleotide sequence of VGAM23 RNA of FIG. 23A, designated SEQ ID:122.

[1055] Another function of VGAM23 is therefore inhibition of dystrophin (muscular dystrophy, Duchenne and Becker types), includes D (DMD), a host gene which encodes a Protein that is associated with duchenne muscular dystrophy (dmd) and becker muscular dystrophy, as part of a novel viral mechanism used by Equine herpesvirus 2 for attacking a host. Accordingly, utilities of VGAM23 include diagnosis, prevention and treatment of viral infection by Equine herpesvirus 2.

[1056] The function of DMD has been established by previous studies. Roberts et al. (1992) described a general approach to the identification of the basic defect in the one-third of DMD patients who do not show a gross rearrangement of the dystrophin gene. The method involved nested amplification, chemical mismatched detection, and sequencing of reverse transcripts of trace amounts of dystrophin mRNA from peripheral blood lymphocytes. Analysis of the entire coding region (11 kb) in 7 patients resulted in detection of a sequence change in each case that was clearly sufficient to cause the disease. All the mutations were expected to cause premature translation termination, and the resulting phenotypes were thus equivalent to those caused by frameshifting deletions; see 300377.0003-300377.0009. Deletions and point mutations in the DMD gene cause either DMD or the milder Becker muscular dystrophy, depending on whether the translational reading frame is lost or maintained. De Angelis et al. (2002) reasoned that because internal in-frame deletions in the protein produce only mild myopathic symptoms, a partially corrected phenotype could be restored by preventing the inclusion of specific mutated exons in the mature dystrophin mRNA. Such control had previously been accomplished by the use of synthetic oligonucleotides. To circumvent the disadvantageous necessity for periodic administration of the synthetic oligonucleotides, De Angelis et al. (2002) produced several constructs able to express in vivo, in a stable fashion, large amounts of chimeric RNAs containing antisense sequences. They showed that antisense molecules against exon 51 splice junctions were able to direct skipping of that exon in the human DMD deletion 48-50 and to rescue dystrophin synthesis. They also showed that the highest skipping activity occurred when antisense constructs against the 5-prime and 3-prime splice sites were coexpressed in the same cell. The effects were tested in cultured myoblasts from a DMD patient. The deletion of exons 48-50 resulted in a premature termination codon in exon 51. The antisense sequences complementary to exon 51 splice junctions induced efficient skipping of exon 51 and partial rescue of dystrophin synthesis. X-linked dilated cardiomyopathy is a dystrophinopathy characterized by severe cardiomyopathy with no skeletal muscle involvement. Several XLCM patients have been described with mutations that abolish dystrophin muscle isoform expression, but with increased expression of brain and cerebellar Purkinje isoforms of the gene exclusively in the skeletal muscle. Bastianutto et al. (2001) determined that 2 XLCM patients bore deletions that removed the muscle promoter and exon 1, but not the brain and cerebellar Purkinje promoters. The brain and cerebellar Purkinje promoters were found to be essentially inactive in muscle cell lines and primary cultures. Since dystrophin muscle enhancer 1 (DME1), a muscle-specific enhancer, is preserved in these patients, the authors tested its ability to upregulate the brain and cerebellar Purkinje promoters in muscle cells. Brain and cerebellar Purkinje promoter activity was significantly increased in the presence of DME1, and activation was observed exclusively in cells presenting a skeletal muscle phenotype versus cardiomyocytes. The authors suggested a role for DME1 in the induction of brain and cerebellar Purkinje isoform expression in the skeletal muscle of XLCM patients defective for muscle isoform expression.

[1057] Animal model experiments lend further support to the function of DMD. Using DNA microarray, Porter et al. (2002) established a molecular signature of dystrophinopathy in the mdx mouse. In leg muscle, 242 differentially expressed genes were identified. Data provided evidence for coordinated activity of numerous components of a chronic inflammatory response, including cytokine and chemokine signaling, leukocyte adhesion and diapedesis, invasive cell type-specific markers, and complement system activation. Upregulation of secreted phosphoprotein 1 (SPP1; 166490) mRNA and protein in dystrophic muscle identified a novel linkage between inflammatory cells and repair processes. Extracellular matrix genes were upregulated in mdx to levels similar to those in DMD. Since, unlike DMD, mdx exhibits little fibrosis, data suggested that collagen regulation at posttranscriptional stages may mediate extensive fibrosis in DMD.

[1058] It is appreciated that the abovementioned animal model for DMD is acknowledged by those skilled in the art as a scientifically valid animal model, as can be further appreciated from the publications sited hereinbelow.

[1059] Full details of the abovementioned studies are described in the following publications, the disclosure of which are hereby incorporated by reference:
[1060] De Angelis, F. G.; Sthandier, O.; Berarducci, B.; Toso, S.; Galluzzi, G.; Ricci, E.; Cossu, G.; Bozzoni, I.: Chimeric snRNA molecules carrying antisense sequences against the splice junctions of exon 51 of the dystrophin pre-mRNA induce exon skipping and restoration of a dystrophin synthesis in delta-48-50 DMD cells. Proc Nat. Acad. Sci. 99: 9456-9461, 2002. PubMed ID: 12077324 14. Bastianutto, C.; Bestard, J. A.; Lahnakoski, K.; Broere, D.; De Visser, M.; Zaccolo, M.; Pozzan, T.; Ferlini, A.; Muntoni, F.; Patarnello, T.; Klamut, H. J.: Dystrophin muscle enhancer 1 is implicated in the activation of non-muscle isoforms in the skeletal muscle of patients with X-linked dilated cardiomyopathy. Hum. Molec. Genet. 10: 2627-2635, 2001.

[1061] Further studies establishing the function and utilities of DMD are found in John Hopkins OMIM database record ID 300377, and in references numbered 163-261 listed hereinbelow.

[1062] Reference is now made to DMD BINDING SITE. dystrophin (muscular dystrophy, Duchenne and Becker types), includes D (DMD) is a host target gene of VGAM23, corresponding to VGAM23-HOST TARGET GENE of FIG. 23A. DMD BINDING SITE is a host binding site found in the 3′ untranslated region of DMD, corresponding to HOST BINDING SITE of FIG. 23A. FIG. 23D illustrates the complementarity of the nucleotide sequence of DMD BINDING SITE, designated SEQ ID:126, to the nucleotide sequence of VGAM23 RNA of FIG. 23A, designated SEQ ID:122.

[1063] Yet another function of VGAM23 is therefore inhibition of dystrophin (muscular dystrophy, Duchenne and Becker types), includes D (DMD), a host gene which encodes a Protein that is associated with duchenne muscular dystrophy (dmd) and becker muscular dystrophy, as part of a novel viral mechanism used by Equine herpesvirus 2 for attacking a host. Accordingly, utilities of VGAM23 include diagnosis, prevention and treatment of viral infection by Equine herpesvirus 2.

[1064] The function of DMD has been established by previous studies. Roberts et al. (1992) described a general approach to the identification of the basic defect in the one-third of DMD patients who do not show a gross rearrangement of the dystrophin gene. The method involved nested amplification, chemical mismatched detection, and sequencing of reverse transcripts of trace amounts of dystrophin mRNA from peripheral blood lymphocytes. Analysis of the entire coding region (11 kb) in 7 patients resulted in detection of a sequence change in each case that was clearly sufficient to cause the disease. All the mutations were expected to cause premature translation termination, and the resulting phenotypes were thus equivalent to those caused by frameshifting deletions; see 300377.0003-300377.0009. Deletions and point mutations in the DMD gene cause either DMD or the milder Becker muscular dystrophy, depending on whether the translational reading frame is lost or maintained. De Angelis et al. (2002) reasoned that because internal in-frame deletions in the protein produce only mild myopathic symptoms, a partially corrected phenotype could be restored by preventing the inclusion of specific mutated exons in the mature dystrophin mRNA. Such control had previously been accomplished by the use of synthetic oligonucleotides. To circumvent the disadvantageous necessity for periodic administration of the synthetic oligonucleotides, De Angelis et al. (2002) produced several constructs able to express in vivo, in a stable fashion, large amounts of chimeric RNAs containing antisense sequences. They showed that antisense molecules against exon 51 splice junctions were able to direct skipping of that exon in the human DMD deletion 48-50 and to rescue dystrophin synthesis. They also showed that the highest skipping activity occurred when antisense constructs against the 5-prime and 3-prime splice sites were coexpressed in the same cell. The effects were tested in cultured myoblasts from a DMD patient. The deletion of exons 48-50 resulted in a premature termination codon in exon 51. The antisense sequences complementary to exon 51 splice junctions induced efficient skipping of exon 51 and partial rescue of dystrophin synthesis. X-linked dilated cardiomyopathy is a dystrophinopathy characterized by severe cardiomyopathy with no skeletal muscle involvement. Several XLCM patients have been described with mutations that abolish dystrophin muscle isoform expression, but with increased expression of brain and cerebellar Purkinje isoforms of the gene exclusively in the skeletal muscle. Bastianutto et al. (2001) determined that 2 XLCM patients bore deletions that removed the muscle promoter and exon 1, but not the brain and cerebellar Purkinje promoters. The brain and cerebellar Purkinje promoters were found to be essentially inactive in muscle cell lines and primary cultures. Since dystrophin muscle enhancer 1 (DME1), a muscle-specific enhancer, is preserved in these patients, the authors tested its ability to upregulate the brain and cerebellar Purkinje promoters in muscle cells. Brain and cerebellar Purkinje promoter activity was significantly increased in the presence of DME1, and activation was observed exclusively in cells presenting a skeletal muscle phenotype versus cardiomyocytes. The authors suggested a role for DME1 in the induction of brain and cerebellar Purkinje isoform expression in the skeletal muscle of XLCM patients defective for muscle isoform expression.

[1065] Animal model experiments lend further support to the function of DMD. Using DNA microarray, Porter et al. (2002) established a molecular signature of dystrophinopathy in the mdx mouse. In leg muscle, 242 differentially expressed genes were identified. Data provided evidence for coordinated activity of numerous components of a chronic inflammatory response, including cytokine and chemokine signaling, leukocyte adhesion and diapedesis, invasive cell type-specific markers, and complement system activation. Upregulation of secreted phosphoprotein 1 (SPP1; 166490) mRNA and protein in dystrophic muscle identified a novel linkage between inflammatory cells and repair processes. Extracellular matrix genes were upregulated in mdx to levels similar to those in DMD. Since, unlike DMD, mdx exhibits little fibrosis, data suggested that collagen regulation at posttranscriptional stages may mediate extensive fibrosis in DMD.

[1066] It is appreciated that the abovementioned animal model for DMD is acknowledged by those skilled in the art as a scientifically valid animal model, as can be further appreciated from the publications sited hereinbelow.

[1067] Full details of the abovementioned studies are described in the following publications, the disclosure of which are hereby incorporated by reference:
[1068] De Angelis, F. G.; Sthandier, O.; Berarducci, B.; Toso, S.; Galluzzi, G.; Ricci, E.; Cossu, G.; Bozzoni, I.: Chimeric snRNA molecules carrying antisense sequences against the splice junctions of exon 51 of the dystrophin pre-mRNA induce exon skipping and restoration of a dystrophin synthesis in delta-48-50 DMD cells. Proc Nat. Acad. Sci. 99: 9456-9461, 2002. PubMed ID: 12077324 14. Bastianutto, C.; Bestard, J. A.; Lahnakoski, K.; Broere, D.; De Visser, M.; Zaccolo, M.; Pozzan, T.; Ferlini, A.; Muntoni, F.; Patarnello, T.; Klamut, H. J.: Dystrophin muscle enhancer 1 is implicated in the activation of non-muscle isoforms in the skeletal muscle of patients with X-linked dilated cardiomyopathy. Hum. Molec. Genet. 10: 2627-2635, 2001.

[1069] Further studies establishing the function and utilities of DMD are found in John Hopkins OMIM database record ID 300377, and in references numbered 163-261 listed hereinbelow.

[1070] Reference is now made to DMD BINDING SITE. dystrophin (muscular dystrophy, Duchenne and Becker types), includes D (DMD) is a host target gene of VGAM23, corresponding to VGAM23-HOST TARGET GENE of FIG. 23A. DMD BINDING SITE is a host binding site found in the 3′ untranslated region of DMD, corresponding to HOST BINDING SITE of FIG. 23A. FIG. 23D illustrates the complementarity of the nucleotide sequence of DMD BINDING SITE, designated SEQ ID:126, to the nucleotide sequence of VGAM23 RNA of FIG. 23A, designated SEQ ID:122.

[1071] An additional function of VGAM23 is therefore inhibition of dystrophin (muscular dystrophy, Duchenne and Becker types), includes D (DMD), a host gene which encodes a Protein that is associated with duchenne muscular dystrophy (dmd) and becker muscular dystrophy, as part of a novel viral mechanism used by Equine herpesvirus 2 for attacking a host. Accordingly, utilities of VGAM23 include diagnosis, prevention and treatment of viral infection by Equine herpesvirus 2.

[1072] The function of DMD has been established by previous studies. Roberts et al. (1992) described a general approach to the identification of the basic defect in the one-third of DMD patients who do not show a gross rearrangement of the dystrophin gene. The method involved nested amplification, chemical mismatched detection, and sequencing of reverse transcripts of trace amounts of dystrophin mRNA from peripheral blood lymphocytes. Analysis of the entire coding region (11 kb) in 7 patients resulted in detection of a sequence change in each case that was clearly sufficient to cause the disease. All the mutations were expected to cause premature translation termination, and the resulting phenotypes were thus equivalent to those caused by frameshifting deletions; see 300377.0003-300377.0009. Deletions and point mutations in the DMD gene cause either DMD or the milder Becker muscular dystrophy, depending on whether the translational reading frame is lost or maintained. De Angelis et al. (2002) reasoned that because internal in-frame deletions in the protein produce only mild myopathic symptoms, a partially corrected phenotype could be restored by preventing the inclusion of specific mutated exons in the mature dystrophin mRNA. Such control had previously been accomplished by the use of synthetic oligonucleotides. To circumvent the disadvantageous necessity for periodic administration of the synthetic oligonucleotides, De Angelis et al. (2002) produced several constructs able to express in vivo, in a stable fashion, large amounts of chimeric RNAs containing antisense sequences. They showed that antisense molecules against exon 51 splice junctions were able to direct skipping of that exon in the human DMD deletion 48-50 and to rescue dystrophin synthesis. They also showed that the highest skipping activity occurred when antisense constructs against the 5-prime and 3-prime splice sites were coexpressed in the same cell. The effects were tested in cultured myoblasts from a DMD patient. The deletion of exons 48-50 resulted in a premature termination codon in exon 51. The antisense sequences complementary to exon 51 splice junctions induced efficient skipping of exon 51 and partial rescue of dystrophin synthesis. X-linked dilated cardiomyopathy is a dystrophinopathy characterized by severe cardiomyopathy with no skeletal muscle involvement. Several XLCM patients have been described with mutations that abolish dystrophin muscle isoform expression, but with increased expression of brain and cerebellar Purkinje isoforms of the gene exclusively in the skeletal muscle. Bastianutto et al. (2001) determined that 2 XLCM patients bore deletions that removed the muscle promoter and exon 1, but not the brain and cerebellar Purkinje promoters. The brain and cerebellar Purkinje promoters were found to be essentially inactive in muscle cell lines and primary cultures. Since dystrophin muscle enhancer 1 (DME1), a muscle-specific enhancer, is preserved in these patients, the authors tested its ability to upregulate the brain and cerebellar Purkinje promoters in muscle cells. Brain and cerebellar Purkinje promoter activity was significantly increased in the presence of DME1, and activation was observed exclusively in cells presenting a skeletal muscle phenotype versus cardiomyocytes. The authors suggested a role for DME1 in the induction of brain and cerebellar Purkinje isoform expression in the skeletal muscle of XLCM patients defective for muscle isoform expression.

[1073] Animal model experiments lend further support to the function of DMD. Using DNA microarray, Porter et al. (2002) established a molecular signature of dystrophinopathy in the mdx mouse. In leg muscle, 242 differentially expressed genes were identified. Data provided evidence for coordinated activity of numerous components of a chronic inflammatory response, including cytokine and chemokine signaling, leukocyte adhesion and diapedesis, invasive cell type-specific markers, and complement system activation. Upregulation of secreted phosphoprotein 1 (SPP1; 166490) mRNA and protein in dystrophic muscle identified a novel linkage between inflammatory cells and repair processes. Extracellular matrix genes were upregulated in mdx to levels similar to those in DMD. Since, unlike DMD, mdx exhibits little fibrosis, data suggested that collagen regulation at posttranscriptional stages may mediate extensive fibrosis in DMD.

[1074] It is appreciated that the abovementioned animal model for DMD is acknowledged by those skilled in the art as a scientifically valid animal model, as can be further appreciated from the publications sited hereinbelow.

[1075] Full details of the abovementioned studies are described in the following publications, the disclosure of which are hereby incorporated by reference:
[1076] De Angelis, F. G.; Sthandier, O.; Berarducci, B.; Toso, S.; Galluzzi, G.; Ricci, E.; Cossu, G.; Bozzoni, I.: Chimeric snRNA molecules carrying antisense sequences against the splice junctions of exon 51 of the dystrophin pre-mRNA induce exon skipping and restoration of a dystrophin synthesis in delta-48-50 DMD cells. Proc Nat. Acad. Sci. 99: 9456-9461, 2002. PubMed ID: 12077324 14. Bastianutto, C.; Bestard, J. A.; Lahnakoski, K.; Broere, D.; De Visser, M.; Zaccolo, M.; Pozzan, T.; Ferlini, A.; Muntoni, F.; Patarnello, T.; Klamut, H. J.: Dystrophin muscle enhancer 1 is implicated in the activation of non-muscle isoforms in the skeletal muscle of patients with X-linked dilated cardiomyopathy. Hum. Molec. Genet. 10: 2627-2635, 2001.

[1077] Further studies establishing the function and utilities of DMD are found in John Hopkins OMIM database record ID 300377, and in references numbered 163-261 listed hereinbelow.

[1078] Reference is now made to DMD BINDING SITE. dystrophin (muscular dystrophy, Duchenne and Becker types), includes D (DMD) is a host target gene of VGAM23, corresponding to VGAM23-HOST TARGET GENE of FIG. 23A. DMD BINDING SITE is a host binding site found in the 3′ untranslated region of DMD, corresponding to HOST BINDING SITE of FIG. 23A. FIG. 23D illustrates the complementarity of the nucleotide sequence of DMD BINDING SITE, designated SEQ ID:126, to the nucleotide sequence of VGAM23 RNA of FIG. 23A, designated SEQ ID:122.

[1079] A further function of VGAM23 is therefore inhibition of dystrophin (muscular dystrophy, Duchenne and Becker types), includes D (DMD), a host gene which encodes a Protein that is associated with duchenne muscular dystrophy (dmd) and becker muscular dystrophy, as part of a novel viral mechanism used by Equine herpesvirus 2 for attacking a host. Accordingly, utilities of VGAM23 include diagnosis, prevention and treatment of viral infection by Equine herpesvirus 2.

[1080] The function of DMD has been established by previous studies. Roberts et al. (1992) described a general approach to the identification of the basic defect in the one-third of DMD patients who do not show a gross rearrangement of the dystrophin gene. The method involved nested amplification, chemical mismatched detection, and sequencing of reverse transcripts of trace amounts of dystrophin mRNA from peripheral blood lymphocytes. Analysis of the entire coding region (11 kb) in 7 patients resulted in detection of a sequence change in each case that was clearly sufficient to cause the disease. All the mutations were expected to cause premature translation termination, and the resulting phenotypes were thus equivalent to those caused by frameshifting deletions; see 300377.0003-300377.0009. Deletions and point mutations in the DMD gene cause either DMD or the milder Becker muscular dystrophy, depending on whether the translational reading frame is lost or maintained. De Angelis et al. (2002) reasoned that because internal in-frame deletions in the protein produce only mild myopathic symptoms, a partially corrected phenotype could be restored by preventing the inclusion of specific mutated exons in the mature dystrophin mRNA. Such control had previously been accomplished by the use of synthetic oligonucleotides. To circumvent the disadvantageous necessity for periodic administration of the synthetic oligonucleotides, De Angelis et al. (2002) produced several constructs able to express in vivo, in a stable fashion, large amounts of chimeric RNAs containing antisense sequences. They showed that antisense molecules against exon 51 splice junctions were able to direct skipping of that exon in the human DMD deletion 48-50 and to rescue dystrophin synthesis. They also showed that the highest skipping activity occurred when antisense constructs against the 5-prime and 3-prime splice sites were coexpressed in the same cell. The effects were tested in cultured myoblasts from a DMD patient. The deletion of exons 48-50 resulted in a premature termination codon in exon 51. The antisense sequences complementary to exon 51 splice junctions induced efficient skipping of exon 51 and partial rescue of dystrophin synthesis. X-linked dilated cardiomyopathy is a dystrophinopathy characterized by severe cardiomyopathy with no skeletal muscle involvement. Several XLCM patients have been described with mutations that abolish dystrophin muscle isoform expression, but with increased expression of brain and cerebellar Purkinje isoforms of the gene exclusively in the skeletal muscle. Bastianutto et al. (2001) determined that 2 XLCM patients bore deletions that removed the muscle promoter and exon 1, but not the brain and cerebellar Purkinje promoters. The brain and cerebellar Purkinje promoters were found to be essentially inactive in muscle cell lines and primary cultures. Since dystrophin muscle enhancer 1 (DME1), a muscle-specific enhancer, is preserved in these patients, the authors tested its ability to upregulate the brain and cerebellar Purkinje promoters in muscle cells. Brain and cerebellar Purkinje promoter activity was significantly increased in the presence of DME1, and activation was observed exclusively in cells presenting a skeletal muscle phenotype versus cardiomyocytes. The authors suggested a role for DME1 in the induction of brain and cerebellar Purkinje isoform expression in the skeletal muscle of XLCM patients defective for muscle isoform expression.

[1081] Animal model experiments lend further support to the function of DMD. Using DNA microarray, Porter et al. (2002) established a molecular signature of dystrophinopathy in the mdx mouse. In leg muscle, 242 differentially expressed genes were identified. Data provided evidence for coordinated activity of numerous components of a chronic inflammatory response, including cytokine and chemokine signaling, leukocyte adhesion and diapedesis, invasive cell type-specific markers, and complement system activation. Upregulation of secreted phosphoprotein 1 (SPP1; 166490) mRNA and protein in dystrophic muscle identified a novel linkage between inflammatory cells and repair processes. Extracellular matrix genes were upregulated in mdx to levels similar to those in DMD. Since, unlike DMD, mdx exhibits little fibrosis, data suggested that collagen regulation at posttranscriptional stages may mediate extensive fibrosis in DMD.

[1082] It is appreciated that the abovementioned animal model for DMD is acknowledged by those skilled in the art as a scientifically valid animal model, as can be further appreciated from the publications sited hereinbelow.

[1083] Full details of the abovementioned studies are described in the following publications, the disclosure of which are hereby incorporated by reference:
[1084] De Angelis, F. G.; Sthandier, O.; Berarducci, B.; Toso, S.; Galluzzi, G.; Ricci, E.; Cossu, G.; Bozzoni, I.: Chimeric snRNA molecules carrying antisense sequences against the splice junctions of exon 51 of the dystrophin pre-mRNA induce exon skipping and restoration of a dystrophin synthesis in delta-48-50 DMD cells. Proc Nat. Acad. Sci. 99: 9456-9461, 2002. PubMed ID: 12077324 14. Bastianutto, C.; Bestard, J. A.; Lahnakoski, K.; Broere, D.; De Visser, M.; Zaccolo, M.; Pozzan, T.; Ferlini, A.; Muntoni, F.; Patarnello, T.; Klamut, H. J.: Dystrophin muscle enhancer 1 is implicated in the activation of non-muscle isoforms in the skeletal muscle of patients with X-linked dilated cardiomyopathy. Hum. Molec. Genet. 10: 2627-2635, 2001.

[1085] Further studies establishing the function and utilities of DMD are found in John Hopkins OMIM database record ID 300377, and in references numbered 163-261 listed hereinbelow.

[1086] Reference is now made to DMD BINDING SITE. dystrophin (muscular dystrophy, Duchenne and Becker types), includes D (DMD) is a host target gene of VGAM23, corresponding to VGAM23-HOST TARGET GENE of FIG. 23A. DMD BINDING SITE is a host binding site found in the 3′ untranslated region of DMD, corresponding to HOST BINDING SITE of FIG. 23A. FIG. 23D illustrates the complementarity of the nucleotide sequence of DMD BINDING SITE, designated SEQ ID:126, to the nucleotide sequence of VGAM23 RNA of FIG. 23A, designated SEQ ID:122.

[1087] Yet a further function of VGAM23 is therefore inhibition of dystrophin (muscular dystrophy, Duchenne and Becker types), includes D (DMD), a host gene which encodes a Protein that is associated with duchenne muscular dystrophy (dmd) and becker muscular dystrophy, as part of a novel viral mechanism used by Equine herpesvirus 2 for attacking a host. Accordingly, utilities of VGAM23 include diagnosis, prevention and treatment of viral infection by Equine herpesvirus 2.

[1088] The function of DMD has been established by previous studies. Roberts et al. (1992) described a general approach to the identification of the basic defect in the one-third of DMD patients who do not show a gross rearrangement of the dystrophin gene. The method involved nested amplification, chemical mismatched detection, and sequencing of reverse transcripts of trace amounts of dystrophin mRNA from peripheral blood lymphocytes. Analysis of the entire coding region (11 kb) in 7 patients resulted in detection of a sequence change in each case that was clearly sufficient to cause the disease. All the mutations were expected to cause premature translation termination, and the resulting phenotypes were thus equivalent to those caused by frameshifting deletions; see 300377.0003-300377.0009. Deletions and point mutations in the DMD gene cause either DMD or the milder Becker muscular dystrophy, depending on whether the translational reading frame is lost or maintained. De Angelis et al. (2002) reasoned that because internal in-frame deletions in the protein produce only mild myopathic symptoms, a partially corrected phenotype could be restored by preventing the inclusion of specific mutated exons in the mature dystrophin mRNA. Such control had previously been accomplished by the use of synthetic oligonucleotides. To circumvent the disadvantageous necessity for periodic administration of the synthetic oligonucleotides, De Angelis et al. (2002) produced several constructs able to express in vivo, in a stable fashion, large amounts of chimeric RNAs containing antisense sequences. They showed that antisense molecules against exon 51 splice junctions were able to direct skipping of that exon in the human DMD deletion 48-50 and to rescue dystrophin synthesis. They also showed that the highest skipping activity occurred when antisense constructs against the 5-prime and 3-prime splice sites were coexpressed in the same cell. The effects were tested in cultured myoblasts from a DMD patient. The deletion of exons 48-50 resulted in a premature termination codon in exon 51. The antisense sequences complementary to exon 51 splice junctions induced efficient skipping of exon 51 and partial rescue of dystrophin synthesis. X-linked dilated cardiomyopathy is a dystrophinopathy characterized by severe cardiomyopathy with no skeletal muscle involvement. Several XLCM patients have been described with mutations that abolish dystrophin muscle isoform expression, but with increased expression of brain and cerebellar Purkinje isoforms of the gene exclusively in the skeletal muscle. Bastianutto et al. (2001) determined that 2 XLCM patients bore deletions that removed the muscle promoter and exon 1, but not the brain and cerebellar Purkinje promoters. The brain and cerebellar Purkinje promoters were found to be essentially inactive in muscle cell lines and primary cultures. Since dystrophin muscle enhancer 1 (DME1), a muscle-specific enhancer, is preserved in these patients, the authors tested its ability to upregulate the brain and cerebellar Purkinje promoters in muscle cells. Brain and cerebellar Purkinje promoter activity was significantly increased in the presence of DME1, and activation was observed exclusively in cells presenting a skeletal muscle phenotype versus cardiomyocytes. The authors suggested a role for DME1 in the induction of brain and cerebellar Purkinje isoform expression in the skeletal muscle of XLCM patients defective for muscle isoform expression.

[1089] Animal model experiments lend further support to the function of DMD. Using DNA microarray, Porter et al. (2002) established a molecular signature of dystrophinopathy in the mdx mouse. In leg muscle, 242 differentially expressed genes were identified. Data provided evidence for coordinated activity of numerous components of a chronic inflammatory response, including cytokine and chemokine signaling, leukocyte adhesion and diapedesis, invasive cell type-specific markers, and complement system activation. Upregulation of secreted phosphoprotein 1 (SPP1; 166490) mRNA and protein in dystrophic muscle identified a novel linkage between inflammatory cells and repair processes. Extracellular matrix genes were upregulated in mdx to levels similar to those in DMD. Since, unlike DMD, mdx exhibits little fibrosis, data suggested that collagen regulation at posttranscriptional stages may mediate extensive fibrosis in DMD.

[1090] It is appreciated that the abovementioned animal model for DMD is acknowledged by those skilled in the art as a scientifically valid animal model, as can be further appreciated from the publications sited hereinbelow.

[1091] Full details of the abovementioned studies are described in the following publications, the disclosure of which are hereby incorporated by reference:
[1092] De Angelis, F. G.; Sthandier, O.; Berarducci, B.; Toso, S.; Galluzzi, G.; Ricci, E.; Cossu, G.; Bozzoni, I.: Chimeric snRNA molecules carrying antisense sequences against the splice junctions of exon 51 of the dystrophin pre-mRNA induce exon skipping and restoration of a dystrophin synthesis in delta-48-50 DMD cells. Proc Nat. Acad. Sci. 99: 9456-9461, 2002. PubMed ID: 12077324 14. Bastianutto, C.; Bestard, J. A.; Lahnakoski, K.; Broere, D.; De Visser, M.; Zaccolo, M.; Pozzan, T.; Ferlini, A.; Muntoni, F.; Patarnello, T.; Klamut, H. J.: Dystrophin muscle enhancer 1 is implicated in the activation of non-muscle isoforms in the skeletal muscle of patients with X-linked dilated cardiomyopathy. Hum. Molec. Genet. 10: 2627-2635, 2001.

[1093] Further studies establishing the function and utilities of DMD are found in John Hopkins OMIM database record ID 300377, and in references numbered 163-261 listed hereinbelow.

[1094] Reference is now made to DMD BINDING SITE. dystrophin (muscular dystrophy, Duchenne and Becker types), includes D (DMD) is a host target gene of VGAM23, corresponding to VGAM23-HOST TARGET GENE of FIG. 23A. DMD BINDING SITE is a host binding site found in the 3′ untranslated region of DMD, corresponding to HOST BINDING SITE of FIG. 23A. FIG. 23D illustrates the complementarity of the nucleotide sequence of DMD BINDING SITE, designated SEQ ID:126, to the nucleotide sequence of VGAM23 RNA of FIG. 23A, designated SEQ ID:122.

[1095] Another function of VGAM23 is therefore inhibition of dystrophin (muscular dystrophy, Duchenne and Becker types), includes D (DMD), a host gene which encodes a Protein that is associated with duchenne muscular dystrophy (dmd) and becker muscular dystrophy, as part of a novel viral mechanism used by Equine herpesvirus 2 for attacking a host. Accordingly, utilities of VGAM23 include diagnosis, prevention and treatment of viral infection by Equine herpesvirus 2.

[1096] The function of DMD has been established by previous studies. Roberts et al. (1992) described a general approach to the identification of the basic defect in the one-third of DMD patients who do not show a gross rearrangement of the dystrophin gene. The method involved nested amplification, chemical mismatched detection, and sequencing of reverse transcripts of trace amounts of dystrophin mRNA from peripheral blood lymphocytes. Analysis of the entire coding region (11 kb) in 7 patients resulted in detection of a sequence change in each case that was clearly sufficient to cause the disease. All the mutations were expected to cause premature translation termination, and the resulting phenotypes were thus equivalent to those caused by frameshifting deletions; see 300377.0003-300377.0009. Deletions and point mutations in the DMD gene cause either DMD or the milder Becker muscular dystrophy, depending on whether the translational reading frame is lost or maintained. De Angelis et al. (2002) reasoned that because internal in-frame deletions in the protein produce only mild myopathic symptoms, a partially corrected phenotype could be restored by preventing the inclusion of specific mutated exons in the mature dystrophin mRNA. Such control had previously been accomplished by the use of synthetic oligonucleotides. To circumvent the disadvantageous necessity for periodic administration of the synthetic oligonucleotides, De Angelis et al. (2002) produced several constructs able to express in vivo, in a stable fashion, large amounts of chimeric RNAs containing antisense sequences. They showed that antisense molecules against exon 51 splice junctions were able to direct skipping of that exon in the human DMD deletion 48-50 and to rescue dystrophin synthesis. They also showed that the highest skipping activity occurred when antisense constructs against the 5-prime and 3-prime splice sites were coexpressed in the same cell. The effects were tested in cultured myoblasts from a DMD patient. The deletion of exons 48-50 resulted in a premature termination codon in exon 51. The antisense sequences complementary to exon 51 splice junctions induced efficient skipping of exon 51 and partial rescue of dystrophin synthesis. X-linked dilated cardiomyopathy is a dystrophinopathy characterized by severe cardiomyopathy with no skeletal muscle involvement. Several XLCM patients have been described with mutations that abolish dystrophin muscle isoform expression, but with increased expression of brain and cerebellar Purkinje isoforms of the gene exclusively in the skeletal muscle. Bastianutto et al. (2001) determined that 2 XLCM patients bore deletions that removed the muscle promoter and exon 1, but not the brain and cerebellar Purkinje promoters. The brain and cerebellar Purkinje promoters were found to be essentially inactive in muscle cell lines and primary cultures. Since dystrophin muscle enhancer 1 (DME1), a muscle-specific enhancer, is preserved in these patients, the authors tested its ability to upregulate the brain and cerebellar Purkinje promoters in muscle cells. Brain and cerebellar Purkinje promoter activity was significantly increased in the presence of DME1, and activation was observed exclusively in cells presenting a skeletal muscle phenotype versus cardiomyocytes. The authors suggested a role for DME1 in the induction of brain and cerebellar Purkinje isoform expression in the skeletal muscle of XLCM patients defective for muscle isoform expression.

[1097] Animal model experiments lend further support to the function of DMD. Using DNA microarray, Porter et al. (2002) established a molecular signature of dystrophinopathy in the mdx mouse. In leg muscle, 242 differentially expressed genes were identified. Data provided evidence for coordinated activity of numerous components of a chronic inflammatory response, including cytokine and chemokine signaling, leukocyte adhesion and diapedesis, invasive cell type-specific markers, and complement system activation. Upregulation of secreted phosphoprotein 1 (SPP1; 166490) mRNA and protein in dystrophic muscle identified a novel linkage between inflammatory cells and repair processes. Extracellular matrix genes were upregulated in mdx to levels similar to those in DMD. Since, unlike DMD, mdx exhibits little fibrosis, data suggested that collagen regulation at posttranscriptional stages may mediate extensive fibrosis in DMD.

[1098] It is appreciated that the abovementioned animal model for DMD is acknowledged by those skilled in the art as a scientifically valid animal model, as can be further appreciated from the publications sited hereinbelow.

[1099] Full details of the abovementioned studies are described in the following publications, the disclosure of which are hereby incorporated by reference:
[1100] De Angelis, F. G.; Sthandier, O.; Berarducci, B.; Toso, S.; Galluzzi, G.; Ricci, E.; Cossu, G.; Bozzoni, I.: Chimeric snRNA molecules carrying antisense sequences against the splice junctions of exon 51 of the dystrophin pre-mRNA induce exon skipping and restoration of a dystrophin synthesis in delta-48-50 DMD cells. Proc Nat. Acad. Sci. 99: 9456-9461, 2002. PubMed ID: 12077324 14. Bastianutto, C.; Bestard, J. A.; Lahnakoski, K.; Broere, D.; De Visser, M.; Zaccolo, M.; Pozzan, T.; Ferlini, A.; Muntoni, F.; Patarnello, T.; Klamut, H. J.: Dystrophin muscle enhancer 1 is implicated in the activation of non-muscle isoforms in the skeletal muscle of patients with X-linked dilated cardiomyopathy. Hum. Molec. Genet. 10: 2627-2635, 2001.

[1101] Further studies establishing the function and utilities of DMD are found in John Hopkins OMIM database record ID 300377, and in references numbered 163-261 listed hereinbelow.

[1102] Reference is now made to DMD BINDING SITE. dystrophin (muscular dystrophy, Duchenne and Becker types), includes D (DMD) is a host target gene of VGAM23, corresponding to VGAM23-HOST TARGET GENE of FIG. 23A. DMD BINDING SITE is a host binding site found in the 3′ untranslated region of DMD, corresponding to HOST BINDING SITE of FIG. 23A. FIG. 23D illustrates the complementarity of the nucleotide sequence of DMD BINDING SITE, designated SEQ ID:126, to the nucleotide sequence of VGAM23 RNA of FIG. 23A, designated SEQ ID:122.

[1103] Yet another function of VGAM23 is therefore inhibition of dystrophin (muscular dystrophy, Duchenne and Becker types), includes D (DMD), a host gene which encodes a Protein that is associated with duchenne muscular dystrophy (dmd) and becker muscular dystrophy, as part of a novel viral mechanism used by Equine herpesvirus 2 for attacking a host. Accordingly, utilities of VGAM23 include diagnosis, prevention and treatment of viral infection by Equine herpesvirus 2.

[1104] The function of DMD has been established by previous studies. Roberts et al. (1992) described a general approach to the identification of the basic defect in the one-third of DMD patients who do not show a gross rearrangement of the dystrophin gene. The method involved nested amplification, chemical mismatched detection, and sequencing of reverse transcripts of trace amounts of dystrophin mRNA from peripheral blood lymphocytes. Analysis of the entire coding region (11 kb) in 7 patients resulted in detection of a sequence change in each case that was clearly sufficient to cause the disease. All the mutations were expected to cause premature translation termination, and the resulting phenotypes were thus equivalent to those caused by frameshifting deletions; see 300377.0003-300377.0009. Deletions and point mutations in the DMD gene cause either DMD or the milder Becker muscular dystrophy, depending on whether the translational reading frame is lost or maintained. De Angelis et al. (2002) reasoned that because internal in-frame deletions in the protein produce only mild myopathic symptoms, a partially corrected phenotype could be restored by preventing the inclusion of specific mutated exons in the mature dystrophin mRNA. Such control had previously been accomplished by the use of synthetic oligonucleotides. To circumvent the disadvantageous necessity for periodic administration of the synthetic oligonucleotides, De Angelis et al. (2002) produced several constructs able to express in vivo, in a stable fashion, large amounts of chimeric RNAs containing antisense sequences. They showed that antisense molecules against exon 51 splice junctions were able to direct skipping of that exon in the human DMD deletion 48-50 and to rescue dystrophin synthesis. They also showed that the highest skipping activity occurred when antisense constructs against the 5-prime and 3-prime splice sites were coexpressed in the same cell. The effects were tested in cultured myoblasts from a DMD patient. The deletion of exons 48-50 resulted in a premature termination codon in exon 51. The antisense sequences complementary to exon 51 splice junctions induced efficient skipping of exon 51 and partial rescue of dystrophin synthesis. X-linked dilated cardiomyopathy is a dystrophinopathy characterized by severe cardiomyopathy with no skeletal muscle involvement. Several XLCM patients have been described with mutations that abolish dystrophin muscle isoform expression, but with increased expression of brain and cerebellar Purkinje isoforms of the gene exclusively in the skeletal muscle. Bastianutto et al. (2001) determined that 2 XLCM patients bore deletions that removed the muscle promoter and exon 1, but not the brain and cerebellar Purkinje promoters. The brain and cerebellar Purkinje promoters were found to be essentially inactive in muscle cell lines and primary cultures. Since dystrophin muscle enhancer 1 (DME1), a muscle-specific enhancer, is preserved in these patients, the authors tested its ability to upregulate the brain and cerebellar Purkinje promoters in muscle cells. Brain and cerebellar Purkinje promoter activity was significantly increased in the presence of DME1, and activation was observed exclusively in cells presenting a skeletal muscle phenotype versus cardiomyocytes. The authors suggested a role for DME1 in the induction of brain and cerebellar Purkinje isoform expression in the skeletal muscle of XLCM patients defective for muscle isoform expression.

[1105] Animal model experiments lend further support to the function of DMD. Using DNA microarray, Porter et al. (2002) established a molecular signature of dystrophinopathy in the mdx mouse. In leg muscle, 242 differentially expressed genes were identified. Data provided evidence for coordinated activity of numerous components of a chronic inflammatory response, including cytokine and chemokine signaling, leukocyte adhesion and diapedesis, invasive cell type-specific markers, and complement system activation. Upregulation of secreted phosphoprotein 1 (SPP1; 166490) mRNA and protein in dystrophic muscle identified a novel linkage between inflammatory cells and repair processes. Extracellular matrix genes were upregulated in mdx to levels similar to those in DMD. Since, unlike DMD, mdx exhibits little fibrosis, data suggested that collagen regulation at posttranscriptional stages may mediate extensive fibrosis in DMD.

[1106] It is appreciated that the abovementioned animal model for DMD is acknowledged by those skilled in the art as a scientifically valid animal model, as can be further appreciated from the publications sited hereinbelow.

[1107] Full details of the abovementioned studies are described in the following publications, the disclosure of which are hereby incorporated by reference:
[1108] De Angelis, F. G.; Sthandier, O.; Berarducci, B.; Toso, S.; Galluzzi, G.; Ricci, E.; Cossu, G.; Bozzoni, I.: Chimeric snRNA molecules carrying antisense sequences against the splice junctions of exon 51 of the dystrophin pre-mRNA induce exon skipping and restoration of a dystrophin synthesis in delta-48-50 DMD cells. Proc Nat. Acad. Sci. 99: 9456-9461, 2002. PubMed ID: 12077324 14. Bastianutto, C.; Bestard, J. A.; Lahnakoski, K.; Broere, D.; De Visser, M.; Zaccolo, M.; Pozzan, T.; Ferlini, A.; Muntoni, F.; Patarnello, T.; Klamut, H. J.: Dystrophin muscle enhancer 1 is implicated in the activation of non-muscle isoforms in the skeletal muscle of patients with X-linked dilated cardiomyopathy. Hum. Molec. Genet. 10: 2627-2635, 2001.

[1109] Further studies establishing the function and utilities of DMD are found in John Hopkins OMIM database record ID 300377, and in references numbered 163-261 listed hereinbelow.

[1110] Reference is now made to DMD BINDING SITE. dystrophin (muscular dystrophy, Duchenne and Becker types), includes D (DMD) is a host target gene of VGAM23, corresponding to VGAM23-HOST TARGET GENE of FIG. 23A. DMD BINDING SITE is a host binding site found in the 3′ untranslated region of DMD, corresponding to HOST BINDING SITE of FIG. 23A. FIG. 23D illustrates the complementarity of the nucleotide sequence of DMD BINDING SITE, designated SEQ ID:126, to the nucleotide sequence of VGAM23 RNA of FIG. 23A, designated SEQ ID:122.

[1111] An additional function of VGAM23 is therefore inhibition of dystrophin (muscular dystrophy, Duchenne and Becker types), includes D (DMD), a host gene which encodes a Protein that is associated with duchenne muscular dystrophy (dmd) and becker muscular dystrophy, as part of a novel viral mechanism used by Equine herpesvirus 2 for attacking a host. Accordingly, utilities of VGAM23 include diagnosis, prevention and treatment of viral infection by Equine herpesvirus 2.

[1112] The function of DMD has been established by previous studies. Roberts et al. (1992) described a general approach to the identification of the basic defect in the one-third of DMD patients who do not show a gross rearrangement of the dystrophin gene. The method involved nested amplification, chemical mismatched detection, and sequencing of reverse transcripts of trace amounts of dystrophin mRNA from peripheral blood lymphocytes. Analysis of the entire coding region (11 kb) in 7 patients resulted in detection of a sequence change in each case that was clearly sufficient to cause the disease. All the mutations were expected to cause premature translation termination, and the resulting phenotypes were thus equivalent to those caused by frameshifting deletions; see 300377.0003-300377.0009. Deletions and point mutations in the DMD gene cause either DMD or the milder Becker muscular dystrophy, depending on whether the translational reading frame is lost or maintained. De Angelis et al. (2002) reasoned that because internal in-frame deletions in the protein produce only mild myopathic symptoms, a partially corrected phenotype could be restored by preventing the inclusion of specific mutated exons in the mature dystrophin mRNA. Such control had previously been accomplished by the use of synthetic oligonucleotides. To circumvent the disadvantageous necessity for periodic administration of the synthetic oligonucleotides, De Angelis et al. (2002) produced several constructs able to express in vivo, in a stable fashion, large amounts of chimeric RNAs containing antisense sequences. They showed that antisense molecules against exon 51 splice junctions were able to direct skipping of that exon in the human DMD deletion 48-50 and to rescue dystrophin synthesis. They also showed that the highest skipping activity occurred when antisense constructs against the 5-prime and 3-prime splice sites were coexpressed in the same cell. The effects were tested in cultured myoblasts from a DMD patient. The deletion of exons 48-50 resulted in a premature termination codon in exon 51. The antisense sequences complementary to exon 51 splice junctions induced efficient skipping of exon 51 and partial rescue of dystrophin synthesis. X-linked dilated cardiomyopathy is a dystrophinopathy characterized by severe cardiomyopathy with no skeletal muscle involvement. Several XLCM patients have been described with mutations that abolish dystrophin muscle isoform expression, but with increased expression of brain and cerebellar Purkinje isoforms of the gene exclusively in the skeletal muscle. Bastianutto et al. (2001) determined that 2 XLCM patients bore deletions that removed the muscle promoter and exon 1, but not the brain and cerebellar Purkinje promoters. The brain and cerebellar Purkinje promoters were found to be essentially inactive in muscle cell lines and primary cultures. Since dystrophin muscle enhancer 1 (DME1), a muscle-specific enhancer, is preserved in these patients, the authors tested its ability to upregulate the brain and cerebellar Purkinje promoters in muscle cells. Brain and cerebellar Purkinje promoter activity was significantly increased in the presence of DME1, and activation was observed exclusively in cells presenting a skeletal muscle phenotype versus cardiomyocytes. The authors suggested a role for DME1 in the induction of brain and cerebellar Purkinje isoform expression in the skeletal muscle of XLCM patients defective for muscle isoform expression.

[1113] Animal model experiments lend further support to the function of DMD. Using DNA microarray, Porter et al. (2002) established a molecular signature of dystrophinopathy in the mdx mouse. In leg muscle, 242 differentially expressed genes were identified. Data provided evidence for coordinated activity of numerous components of a chronic inflammatory response, including cytokine and chemokine signaling, leukocyte adhesion and diapedesis, invasive cell type-specific markers, and complement system activation. Upregulation of secreted phosphoprotein 1 (SPP1; 166490) mRNA and protein in dystrophic muscle identified a novel linkage between inflammatory cells and repair processes. Extracellular matrix genes were upregulated in mdx to levels similar to those in DMD. Since, unlike DMD, mdx exhibits little fibrosis, data suggested that collagen regulation at posttranscriptional stages may mediate extensive fibrosis in DMD.

[1114] It is appreciated that the abovementioned animal model for DMD is acknowledged by those skilled in the art as a scientifically valid animal model, as can be further appreciated from the publications sited hereinbelow.

[1115] Full details of the abovementioned studies are described in the following publications, the disclosure of which are hereby incorporated by reference:
[1116] De Angelis, F. G.; Sthandier, O.; Berarducci, B.; Toso, S.; Galluzzi, G.; Ricci, E.; Cossu, G.; Bozzoni, I.: Chimeric snRNA molecules carrying antisense sequences against the splice junctions of exon 51 of the dystrophin pre-mRNA induce exon skipping and restoration of a dystrophin synthesis in delta-48-50 DMD cells. Proc Nat. Acad. Sci. 99: 9456-9461, 2002. PubMed ID: 12077324 14. Bastianutto, C.; Bestard, J. A.; Lahnakoski, K.; Broere, D.; De Visser, M.; Zaccolo, M.; Pozzan, T.; Ferlini, A.; Muntoni, F.; Patarnello, T.; Klamut, H. J.: Dystrophin muscle enhancer 1 is implicated in the activation of non-muscle isoforms in the skeletal muscle of patients with X-linked dilated cardiomyopathy. Hum. Molec. Genet. 10: 2627-2635, 2001.

[1117] Further studies establishing the function and utilities of DMD are found in John Hopkins OMIM database record ID 300377, and in references numbered 163-261 listed hereinbelow.

[1118] Reference is now made to DMD BINDING SITE. dystrophin (muscular dystrophy, Duchenne and Becker types), includes D (DMD) is a host target gene of VGAM23, corresponding to VGAM23-HOST TARGET GENE of FIG. 23A. DMD BINDING SITE is a host binding site found in the 3′ untranslated region of DMD, corresponding to HOST BINDING SITE of FIG. 23A. FIG. 23D illustrates the complementarity of the nucleotide sequence of DMD BINDING SITE, designated SEQ ID:126, to the nucleotide sequence of VGAM23 RNA of FIG. 23A, designated SEQ ID:122.

[1119] A further function of VGAM23 is therefore inhibition of dystrophin (muscular dystrophy, Duchenne and Becker types), includes D (DMD), a host gene which encodes a Protein that is associated with duchenne muscular dystrophy (dmd) and becker muscular dystrophy, as part of a novel viral mechanism used by Equine herpesvirus 2 for attacking a host. Accordingly, utilities of VGAM23 include diagnosis, prevention and treatment of viral infection by Equine herpesvirus 2.

[1120] The function of DMD has been established by previous studies. Roberts et al. (1992) described a general approach to the identification of the basic defect in the one-third of DMD patients who do not show a gross rearrangement of the dystrophin gene. The method involved nested amplification, chemical mismatched detection, and sequencing of reverse transcripts of trace amounts of dystrophin mRNA from peripheral blood lymphocytes. Analysis of the entire coding region (11 kb) in 7 patients resulted in detection of a sequence change in each case that was clearly sufficient to cause the disease. All the mutations were expected to cause premature translation termination, and the resulting phenotypes were thus equivalent to those caused by frameshifting deletions; see 300377.0003-300377.0009. Deletions and point mutations in the DMD gene cause either DMD or the milder Becker muscular dystrophy, depending on whether the translational reading frame is lost or maintained. De Angelis et al. (2002) reasoned that because internal in-frame deletions in the protein produce only mild myopathic symptoms, a partially corrected phenotype could be restored by preventing the inclusion of specific mutated exons in the mature dystrophin mRNA. Such control had previously been accomplished by the use of synthetic oligonucleotides. To circumvent the disadvantageous necessity for periodic administration of the synthetic oligonucleotides, De Angelis et al. (2002) produced several constructs able to express in vivo, in a stable fashion, large amounts of chimeric RNAs containing antisense sequences. They showed that antisense molecules against exon 51 splice junctions were able to direct skipping of that exon in the human DMD deletion 48-50 and to rescue dystrophin synthesis. They also showed that the highest skipping activity occurred when antisense constructs against the 5-prime and 3-prime splice sites were coexpressed in the same cell. The effects were tested in cultured myoblasts from a DMD patient. The deletion of exons 48-50 resulted in a premature termination codon in exon 51. The antisense sequences complementary to exon 51 splice junctions induced efficient skipping of exon 51 and partial rescue of dystrophin synthesis. X-linked dilated cardiomyopathy is a dystrophinopathy characterized by severe cardiomyopathy with no skeletal muscle involvement. Several XLCM patients have been described with mutations that abolish dystrophin muscle isoform expression, but with increased expression of brain and cerebellar Purkinje isoforms of the gene exclusively in the skeletal muscle. Bastianutto et al. (2001) determined that 2 XLCM patients bore deletions that removed the muscle promoter and exon 1, but not the brain and cerebellar Purkinje promoters. The brain and cerebellar Purkinje promoters were found to be essentially inactive in muscle cell lines and primary cultures. Since dystrophin muscle enhancer 1 (DME1), a muscle-specific enhancer, is preserved in these patients, the authors tested its ability to upregulate the brain and cerebellar Purkinje promoters in muscle cells. Brain and cerebellar Purkinje promoter activity was significantly increased in the presence of DME1, and activation was observed exclusively in cells presenting a skeletal muscle phenotype versus cardiomyocytes. The authors suggested a role for DME1 in the induction of brain and cerebellar Purkinje isoform expression in the skeletal muscle of XLCM patients defective for muscle isoform expression.

[1121] Animal model experiments lend further support to the function of DMD. Using DNA microarray, Porter et al. (2002) established a molecular signature of dystrophinopathy in the mdx mouse. In leg muscle, 242 differentially expressed genes were identified. Data provided evidence for coordinated activity of numerous components of a chronic inflammatory response, including cytokine and chemokine signaling, leukocyte adhesion and diapedesis, invasive cell type-specific markers, and complement system activation. Upregulation of secreted phosphoprotein 1 (SPP1; 166490) mRNA and protein in dystrophic muscle identified a novel linkage between inflammatory cells and repair processes. Extracellular matrix genes were upregulated in mdx to levels similar to those in DMD. Since, unlike DMD, mdx exhibits little fibrosis, data suggested that collagen regulation at posttranscriptional stages may mediate extensive fibrosis in DMD.

[1122] It is appreciated that the abovementioned animal model for DMD is acknowledged by those skilled in the art as a scientifically valid animal model, as can be further appreciated from the publications sited hereinbelow.

[1123] Full details of the abovementioned studies are described in the following publications, the disclosure of which are hereby incorporated by reference:
[1124] De Angelis, F. G.; Sthandier, O.; Berarducci, B.; Toso, S.; Galluzzi, G.; Ricci, E.; Cossu, G.; Bozzoni, I.: Chimeric snRNA molecules carrying antisense sequences against the splice junctions of exon 51 of the dystrophin pre-mRNA induce exon skipping and restoration of a dystrophin synthesis in delta-48-50 DMD cells. Proc Nat. Acad. Sci. 99: 9456-9461, 2002. PubMed ID: 12077324 14. Bastianutto, C.; Bestard, J. A.; Lahnakoski, K.; Broere, D.; De Visser, M.; Zaccolo, M.; Pozzan, T.; Ferlini, A.; Muntoni, F.; Patarnello, T.; Klamut, H. J.: Dystrophin muscle enhancer 1 is implicated in the activation of non-muscle isoforms in the skeletal muscle of patients with X-linked dilated cardiomyopathy. Hum. Molec. Genet. 10: 2627-2635, 2001.

[1125] Further studies establishing the function and utilities of DMD are found in John Hopkins OMIM database record ID 300377, and in references numbered 163-261 listed hereinbelow.

[1126] Reference is now made to DMD BINDING SITE. dystrophin (muscular dystrophy, Duchenne and Becker types), includes D (DMD) is a host target gene of VGAM23, corresponding to VGAM23-HOST TARGET GENE of FIG. 23A. DMD BINDING SITE is a host binding site found in the 3′ untranslated region of DMD, corresponding to HOST BINDING SITE of FIG. 23A. FIG. 23D illustrates the complementarity of the nucleotide sequence of DMD BINDING SITE, designated SEQ ID:126, to the nucleotide sequence of VGAM23 RNA of FIG. 23A, designated SEQ ID:122.

[1127] Yet a further function of VGAM23 is therefore inhibition of dystrophin (muscular dystrophy, Duchenne and Becker types), includes D (DMD), a host gene which encodes a Protein that is associated with duchenne muscular dystrophy (dmd) and becker muscular dystrophy, as part of a novel viral mechanism used by Equine herpesvirus 2 for attacking a host. Accordingly, utilities of VGAM23 include diagnosis, prevention and treatment of viral infection by Equine herpesvirus 2.

[1128] The function of DMD has been established by previous studies. Roberts et al. (1992) described a general approach to the identification of the basic defect in the one-third of DMD patients who do not show a gross rearrangement of the dystrophin gene. The method involved nested amplification, chemical mismatched detection, and sequencing of reverse transcripts of trace amounts of dystrophin mRNA from peripheral blood lymphocytes. Analysis of the entire coding region (11 kb) in 7 patients resulted in detection of a sequence change in each case that was clearly sufficient to cause the disease. All the mutations were expected to cause premature translation termination, and the resulting phenotypes were thus equivalent to those caused by frameshifting deletions; see 300377.0003-300377.0009. Deletions and point mutations in the DMD gene cause either DMD or the milder Becker muscular dystrophy, depending on whether the translational reading frame is lost or maintained. De Angelis et al. (2002) reasoned that because internal in-frame deletions in the protein produce only mild myopathic symptoms, a partially corrected phenotype could be restored by preventing the inclusion of specific mutated exons in the mature dystrophin mRNA. Such control had previously been accomplished by the use of synthetic oligonucleotides. To circumvent the disadvantageous necessity for periodic administration of the synthetic oligonucleotides, De Angelis et al. (2002) produced several constructs able to express in vivo, in a stable fashion, large amounts of chimeric RNAs containing antisense sequences. They showed that antisense molecules against exon 51 splice junctions were able to direct skipping of that exon in the human DMD deletion 48-50 and to rescue dystrophin synthesis. They also showed that the highest skipping activity occurred when antisense constructs against the 5-prime and 3-prime splice sites were coexpressed in the same cell. The effects were tested in cultured myoblasts from a DMD patient. The deletion of exons 48-50 resulted in a premature termination codon in exon 51. The antisense sequences complementary to exon 51 splice junctions induced efficient skipping of exon 51 and partial rescue of dystrophin synthesis. X-linked dilated cardiomyopathy is a dystrophinopathy characterized by severe cardiomyopathy with no skeletal muscle involvement. Several XLCM patients have been described with mutations that abolish dystrophin muscle isoform expression, but with increased expression of brain and cerebellar Purkinje isoforms of the gene exclusively in the skeletal muscle. Bastianutto et al. (2001) determined that 2 XLCM patients bore deletions that removed the muscle promoter and exon 1, but not the brain and cerebellar Purkinje promoters. The brain and cerebellar Purkinje promoters were found to be essentially inactive in muscle cell lines and primary cultures. Since dystrophin muscle enhancer 1 (DME1), a muscle-specific enhancer, is preserved in these patients, the authors tested its ability to upregulate the brain and cerebellar Purkinje promoters in muscle cells. Brain and cerebellar Purkinje promoter activity was significantly increased in the presence of DME1, and activation was observed exclusively in cells presenting a skeletal muscle phenotype versus cardiomyocytes. The authors suggested a role for DME1 in the induction of brain and cerebellar Purkinje isoform expression in the skeletal muscle of XLCM patients defective for muscle isoform expression.

[1129] Animal model experiments lend further support to the function of DMD. Using DNA microarray, Porter et al. (2002) established a molecular signature of dystrophinopathy in the mdx mouse. In leg muscle, 242 differentially expressed genes were identified. Data provided evidence for coordinated activity of numerous components of a chronic inflammatory response, including cytokine and chemokine signaling, leukocyte adhesion and diapedesis, invasive cell type-specific markers, and complement system activation. Upregulation of secreted phosphoprotein 1 (SPP1; 166490) mRNA and protein in dystrophic muscle identified a novel linkage between inflammatory cells and repair processes. Extracellular matrix genes were upregulated in mdx to levels similar to those in DMD. Since, unlike DMD, mdx exhibits little fibrosis, data suggested that collagen regulation at posttranscriptional stages may mediate extensive fibrosis in DMD.

[1130] It is appreciated that the abovementioned animal model for DMD is acknowledged by those skilled in the art as a scientifically valid animal model, as can be further appreciated from the publications sited hereinbelow.

[1131] Full details of the abovementioned studies are described in the following publications, the disclosure of which are hereby incorporated by reference:
[1132] De Angelis, F. G.; Sthandier, O.; Berarducci, B.; Toso, S.; Galluzzi, G.; Ricci, E.; Cossu, G.; Bozzoni, I.: Chimeric snRNA molecules carrying antisense sequences against the splice junctions of exon 51 of the dystrophin pre-mRNA induce exon skipping and restoration of a dystrophin synthesis in delta-48-50 DMD cells. Proc Nat. Acad. Sci. 99: 9456-9461, 2002. PubMed ID: 12077324 14. Bastianutto, C.; Bestard, J. A.; Lahnakoski, K.; Broere, D.; De Visser, M.; Zaccolo, M.; Pozzan, T.; Ferlini, A.; Muntoni, F.; Patarnello, T.; Klamut, H. J.: Dystrophin muscle enhancer 1 is implicated in the activation of non-muscle isoforms in the skeletal muscle of patients with X-linked dilated cardiomyopathy. Hum. Molec. Genet. 10: 2627-2635, 2001.

[1133] Further studies establishing the function and utilities of DMD are found in John Hopkins OMIM database record ID 300377, and in references numbered 163-261 listed hereinbelow.

[1134] Reference is now made to DMD BINDING SITE. dystrophin (muscular dystrophy, Duchenne and Becker types), includes D (DMD) is a host target gene of VGAM23, corresponding to VGAM23-HOST TARGET GENE of FIG. 23A. DMD BINDING SITE is a host binding site found in the 3′ untranslated region of DMD, corresponding to HOST BINDING SITE of FIG. 23A. FIG. 23D illustrates the complementarity of the nucleotide sequence of DMD BINDING SITE, designated SEQ ID:126, to the nucleotide sequence of VGAM23 RNA of FIG. 23A, designated SEQ ID:122.

[1135] Another function of VGAM23 is therefore inhibition of dystrophin (muscular dystrophy, Duchenne and Becker types), includes D (DMD), a host gene which encodes a Protein that is associated with duchenne muscular dystrophy (dmd) and becker muscular dystrophy, as part of a novel viral mechanism used by Equine herpesvirus 2 for attacking a host. Accordingly, utilities of VGAM23 include diagnosis, prevention and treatment of viral infection by Equine herpesvirus 2.

[1136] The function of DMD has been established by previous studies. Roberts et al. (1992) described a general approach to the identification of the basic defect in the one-third of DMD patients who do not show a gross rearrangement of the dystrophin gene. The method involved nested amplification, chemical mismatched detection, and sequencing of reverse transcripts of trace amounts of dystrophin mRNA from peripheral blood lymphocytes. Analysis of the entire coding region (11 kb) in 7 patients resulted in detection of a sequence change in each case that was clearly sufficient to cause the disease. All the mutations were expected to cause premature translation termination, and the resulting phenotypes were thus equivalent to those caused by frameshifting deletions; see 300377.0003-300377.0009. Deletions and point mutations in the DMD gene cause either DMD or the milder Becker muscular dystrophy, depending on whether the translational reading frame is lost or maintained. De Angelis et al. (2002) reasoned that because internal in-frame deletions in the protein produce only mild myopathic symptoms, a partially corrected phenotype could be restored by preventing the inclusion of specific mutated exons in the mature dystrophin mRNA. Such control had previously been accomplished by the use of synthetic oligonucleotides. To circumvent the disadvantageous necessity for periodic administration of the synthetic oligonucleotides, De Angelis et al. (2002) produced several constructs able to express in vivo, in a stable fashion, large amounts of chimeric RNAs containing antisense sequences. They showed that antisense molecules against exon 51 splice junctions were able to direct skipping of that exon in the human DMD deletion 48-50 and to rescue dystrophin synthesis. They also showed that the highest skipping activity occurred when antisense constructs against the 5-prime and 3-prime splice sites were coexpressed in the same cell. The effects were tested in cultured myoblasts from a DMD patient. The deletion of exons 48-50 resulted in a premature termination codon in exon 51. The antisense sequences complementary to exon 51 splice junctions induced efficient skipping of exon 51 and partial rescue of dystrophin synthesis. X-linked dilated cardiomyopathy is a dystrophinopathy characterized by severe cardiomyopathy with no skeletal muscle involvement. Several XLCM patients have been described with mutations that abolish dystrophin muscle isoform expression, but with increased expression of brain and cerebellar Purkinje isoforms of the gene exclusively in the skeletal muscle. Bastianutto et al. (2001) determined that 2 XLCM patients bore deletions that removed the muscle promoter and exon 1, but not the brain and cerebellar Purkinje promoters. The brain and cerebellar Purkinje promoters were found to be essentially inactive in muscle cell lines and primary cultures. Since dystrophin muscle enhancer 1 (DME1), a muscle-specific enhancer, is preserved in these patients, the authors tested its ability to upregulate the brain and cerebellar Purkinje promoters in muscle cells. Brain and cerebellar Purkinje promoter activity was significantly increased in the presence of DME1, and activation was observed exclusively in cells presenting a skeletal muscle phenotype versus cardiomyocytes. The authors suggested a role for DME1 in the induction of brain and cerebellar Purkinje isoform expression in the skeletal muscle of XLCM patients defective for muscle isoform expression.

[1137] Animal model experiments lend further support to the function of DMD. Using DNA microarray, Porter et al. (2002) established a molecular signature of dystrophinopathy in the mdx mouse. In leg muscle, 242 differentially expressed genes were identified. Data provided evidence for coordinated activity of numerous components of a chronic inflammatory response, including cytokine and chemokine signaling, leukocyte adhesion and diapedesis, invasive cell type-specific markers, and complement system activation. Upregulation of secreted phosphoprotein 1 (SPP1; 166490) mRNA and protein in dystrophic muscle identified a novel linkage between inflammatory cells and repair processes. Extracellular matrix genes were upregulated in mdx to levels similar to those in DMD. Since, unlike DMD, mdx exhibits little fibrosis, data suggested that collagen regulation at posttranscriptional stages may mediate extensive fibrosis in DMD.

[1138] It is appreciated that the abovementioned animal model for DMD is acknowledged by those skilled in the art as a scientifically valid animal model, as can be further appreciated from the publications sited hereinbelow.

[1139] Full details of the abovementioned studies are described in the following publications, the disclosure of which are hereby incorporated by reference:
[1140] De Angelis, F. G.; Sthandier, O.; Berarducci, B.; Toso, S.; Galluzzi, G.; Ricci, E.; Cossu, G.; Bozzoni, I.: Chimeric snRNA molecules carrying antisense sequences against the splice junctions of exon 51 of the dystrophin pre-mRNA induce exon skipping and restoration of a dystrophin synthesis in delta-48-50 DMD cells. Proc Nat. Acad. Sci. 99: 9456-9461, 2002. PubMed ID: 12077324 14. Bastianutto, C.; Bestard, J. A.; Lahnakoski, K.; Broere, D.; De Visser, M.; Zaccolo, M.; Pozzan, T.; Ferlini, A.; Muntoni, F.; Patarnello, T.; Klamut, H. J.: Dystrophin muscle enhancer 1 is implicated in the activation of non-muscle isoforms in the skeletal muscle of patients with X-linked dilated cardiomyopathy. Hum. Molec. Genet. 10: 2627-2635, 2001.

[1141] Further studies establishing the function and utilities of DMD are found in John Hopkins OMIM database record ID 300377, and in references numbered 163-261 listed hereinbelow.

[1142] Reference is now made to KRT2A BINDING SITE. keratin 2A (epidermal ichthyosis bullosa of Siemens) (KRT2A) is a host target gene of VGAM23, corresponding to VGAM23-HOST-TARGET GENE of FIG. 23A. KRT2A BINDING SITE is a host binding site found in the 3′ untranslated region of KRT2A, corresponding to HOST BINDING SITE of FIG. 23A. FIG. 23D illustrates the complementarity of the nucleotide sequence of KRT2A BINDING SITE, designated SEQ ID:127, to the nucleotide sequence of VGAM23 RNA of FIG. 23A, designated SEQ ID:122.

[1143] Yet another function of VGAM23 is therefore inhibition of keratin 2A (epidermal ichthyosis bullosa of Siemens) (KRT2A), a host gene which encodes a Protein that is associated with ICHTHYOSIS BULLOSA OF SIEMENS, as part of a novel viral mechanism used by Equine herpesvirus 2 for attacking a host. Accordingly, utilities of VGAM23 include diagnosis, prevention and treatment of viral infection by Equine herpesvirus 2.

[1144] The function of KRT2A has been established by previous studies. Keratins are the major gene product of keratinocytes and form the intermediate filament cytoskeletal network in these cells. Intermediate filament proteins consist of a central alpha-helical rod domain flanked by nonhelical sequences of varying size and composition. Keratin proteins fall into 2 classes on the basis of their electrophoretic properties and sequence similarities. One member of each class is required to form the heterodimeric coiled-coil precursor which through both lateral and longitudinal associations form the mature keratin intermediate filament. The major epidermal keratins of the type I class are KRT9 (144200), KRT10 (148080), KRT14 (148066), and KRT16 (148067); the major epidermal keratins of the type II class are KRT1 (139350), KRT2E, KRT5 (148040), KRT6A (148041), and KRT6B (148042). The expression of individual keratins is specific both for body site and for stage of differentiation of the epidermal keratinocyte. Keratinocytes in the basal layer express KRT5 and KRT14. Upon differentiation and migration to the spinous layer, these genes are downregulated and the expression of KRT1 and KRT10 is induced. In cells of the upper spinous layer, KRT2E and KRT9 are expressed. Although the expression of KRT9 is limited to palmoplantar epidermis, KRT2E is expressed not only in this tissue but also in other regions, notably the epidermis covering the knee, thigh, and groin. It is not known whether these keratins simply replace their respective type I or type II counterpart in the preexisting KRT1/KRT10 network or dimerize with another, as yet undiscovered keratin partner. The other major epidermal keratins, KRT6 and KRT16, are normally expressed in the outer root sheath of the hair follicle and in palmoplantar epidermis Smith et al. (1998) determined the genomic organization and complete sequence of the KRT2E gene, which consists of 9 exons spanning 7,634 by of DNA. By high-resolution radiation hybrid mapping, they localized the gene to the interval between microsatellite markers D125368 and a specific CHLC marker. Several intragenic polymorphisms were detected, including an 18-bp duplication in exon 1, corresponding to the V1 domain of the K2e polypeptide. Two novel mutations, N192Y in the 1A domain and E482K in the 2B domain of K2e, were found in families with IBS

[1145] Full details of the abovementioned studies are described in the following publications, the disclosure of which are hereby incorporated by reference:
[1146] remer, H.; Zeeuwen, P.; McLean, W. H. I.; Mariman, E. C. M.; Lane, E. B.; van de Kerkhof, P. C. M.; Ropers, H.-H.; Steijlen, P. M.: Ichthyosis bullosa of Siemens is caused by mutations in the keratin 2e gene. J. Invest. Derm. 103: 286-289, 1994. PubMed ID: 8077693 2. Collin, C.; Moll, R.; Kubicka, S.; Ouhayoun, J.-P.; Franke, W. W.: Characterization of human cytokeratin 2, an epidermal cytoskeletal protein synthesized late during differentiation. Exp. Cell Res. 202: 132-141, 1992.

[1147] Further studies establishing the function and utilities of KRT2A are found in John Hopkins OMIM database record ID 600194, and in references numbered 262-269 listed hereinbelow.

[1148] Reference is now made to PAIP2 BINDING SITE. PABP-interacting protein 2 (PAIP2) is a host target gene of VGAM23, corresponding to VGAM23-HOST-TARGET GENE of FIG. 23A. PAIP2 BINDING SITE is a host binding site found in the 3′ untranslated region of PAIP2, corresponding to HOST BINDING SITE of FIG. 23A. FIG. 23D illustrates the complementarity of the nucleotide sequence of PAIP2 BINDING SITE, designated SEQ ID:128, to the nucleotide sequence of VGAM23 RNA of FIG. 23A, designated SEQ ID:122.

[1149] An additional function of VGAM23 is therefore inhibition of PABP-interacting protein 2 (PAIP2), a host gene which encodes a Protein that acts as a repressor of translation., as part of a novel viral mechanism used by Equine herpesvirus 2 for attacking a host. Accordingly, utilities of VGAM23 include diagnosis, prevention and treatment of viral infection by Equine herpesvirus 2.

[1150] The function of PAIP2 has been established by previous studies. By Far Western interaction cloning using human PABP as the probe and a placenta cDNA expression library, Khaleghpour et al. (2001) isolated a 1.4-kb cDNA encoding PAIP2. The highly acidic (predicted pI of 3.9), 127-amino acid protein has a predicted molecular mass of 14.5 kD and acts as a repressor of translation both in vitro and in vivo. PAIP2 preferentially inhibited translation of a poly(A)-containing mRNA but had no effect on the translation of hepatitis C virus mRNA, which is cap and eIF4G (see 600495) independent. The authors showed that PAIP2 decreases the affinity of PABP for poly(A) RNA and disrupts the repeating structure of poly(A) ribonucleoprotein. Furthermore, PAIP2 was found to compete with PAIP1 for PABP binding. Thus, Khaleghpour et al. (2001) concluded that PAIP2 inhibits translation by interdicting PABP function.

[1151] Full details of the abovementioned studies are described in the following publications, the disclosure of which are hereby incorporated by reference:
[1152] haleghpour, K.; Svitkin, Y. V.; Craig, A. W.; DeMaria, C. T.; Deo, R. C.; Burley, S. K.; Sonenberg, N.: Translational repression by a novel partner of human poly(A) binding protein, Paip2. Molec. Cell 7: 205-216, 2001.

[1153] Further studies establishing the function and utilities of PAIP2 are found in John Hopkins OMIM database record ID 605604, and in references numbered 270-271 listed hereinbelow.

[1154] Reference is now made to PREP BINDING SITE. prolyl endopeptidase (PREP) is a host target gene of VGAM23, corresponding to VGAM23-HOST-TARGET GENE of FIG. 23A. PREP BINDING SITE is a host binding site found in the 3′ untranslated region of PREP, corresponding to HOST BINDING SITE of FIG. 23A. FIG. 23D illustrates the complementarity of the nucleotide sequence of PREP BINDING SITE, designated SEQ ID:129, to the nucleotide sequence of VGAM23 RNA of FIG. 23A, designated SEQ ID:122.

[1155] A further function of VGAM23 is therefore inhibition of prolyl endopeptidase (PREP), a host gene which encodes a Enzyme that cleaves peptide bonds at the C-terminal side of proline residues., as part of a novel viral mechanism used by Equine herpesvirus 2 for attacking a host. Accordingly, utilities of VGAM23 include diagnosis, prevention and treatment of viral infection by Equine herpesvirus 2.

[1156] The function of PREP has been established by previous studies. Prolyl endopeptidase (EC 3.4.21.26) is a large cytosolic enzyme that belongs to a distinct class of serine peptidases. The enzyme is involved in the maturation and degradation of peptide hormones and neuropeptides. PREP cleaves peptide bonds at the C-terminal side of proline residues. Its activity is confined to action on oligopeptides of less than 10 kD and it has an absolute requirement for the trans-configuration of the peptide bond preceding proline. Vanhoof et al. (1994) sequenced the human cDNA encoding prolyl endopeptidase. A complete cDNA was 2,562 nucleotides long and contained an open reading frame coding for a protein of 710 amino acids. Comparison of the sequences from human lymphocyte PREP and that of pig brain showed 97% identity. Fulop et al. (1998) reported the 1.4-angstrom resolution crystal structure of the porcine PREP enzyme. The enzyme contains a peptidase domain with an alpha/beta hydrolase fold, and its catalytic triad (ser554, his680, asp641) is covered by the central tunnel of an unusual beta propeller. This domain makes PREP an oligopeptidase by excluding large structured peptides from the active site. In this way, the propeller protects larger peptides and proteins from proteolysis in the cytosol.

[1157] Full details of the abovementioned studies are described in the following publications, the disclosure of which are hereby incorporated by reference:
[1158] anhoof, G.; Goossens, F.; Hendriks, L.; De Meester, I.; Hendriks, D.; Vriend, G.; Van Broeckhoven, C.; Scharpe, S.: Cloning and sequence analysis of the gene encoding human lymphocyte prolyl endopeptidase. Gene 149: 363-366, 1994. PubMed ID: 7959018 1. Fulop, V.; Bocskei, Z.; Polgar, L.: Prolyl oligopeptidase: an unusual beta-propeller domain regulates proteolysis. Cell 94: 161-170, 1998.

[1159] Further studies establishing the function and utilities of PREP are found in John Hopkins OMIM database record ID 600400, and in references numbered 272-274 listed hereinbelow.

[1160] Reference is now made to WASF3 BINDING SITE. WAS protein family, member 3 (WASF3) is a host target gene of VGAM23, corresponding to VGAM23-HOST-TARGET GENE of FIG. 23A. WASF3 BINDING SITE is a host binding site found in the 3′ untranslated region of WASF3, corresponding to HOST BINDING SITE of FIG. 23A. FIG. 23D illustrates the complementarity of the nucleotide sequence of WASF3 BINDING SITE, designated SEQ ID:130, to the nucleotide sequence of VGAM23 RNA of FIG. 23A, designated SEQ ID:122.

[1161] Yet a further function of VGAM23 is therefore inhibition of WAS protein family, member 3 (WASF3), a host gene which encodes a Protein that stimulates actin polymerization, as part of a novel viral mechanism used by Equine herpesvirus 2 for attacking a host. Accordingly, utilities of VGAM23 include diagnosis, prevention and treatment of viral infection by Equine herpesvirus 2.

[1162] The function of WASF3 has been established by previous studies. The actin cytoskeleton plays critical roles in cell morphologic changes and motility. Rho family small GTPases such as Rho (see 165370), RAC (see 602048), and CDC42 (116952) organize the actin cytoskeleton. Other major players in actin-based motility are the 7 members of the ARP2/3 complex (see 604221). The Wiskott-Aldrich syndrome protein (WASP; 301000) and WASP-like (WASL; 605056) are among the downstream effector molecules involved in the transmission of signals from tyrosine kinase receptors and small GTPases to the actin cytoskeleton. WASF1 (605035) is also involved in actin reorganization, but its expression is restricted to brain. By searching an EST database for homologs of WASF1 and by screening cDNA libraries, Suetsugu et al. (1999) identified WASF2 (605068) and WASF3, which they termed WAVE2 and WAVE3, respectively. The predicted 502-amino acid WASF3 protein shares 48% amino acid identity with WASF1. Northern blot analysis revealed that, like WASF1, WASF3 expression is strongest in brain, although weak expression was detected in kidney and liver. SDS-PAGE analysis showed that, like other WASP family members, WASF3 binds actin through its C-terminal verprolin homology (VPH) domain. Immunofluorescence microscopy demonstrated that ectopically expressed WASF3 induces abnormal actin clusters. These actin cluster formations were suppressed by deletion of the VPH domain of WASF3.

[1163] Full details of the abovementioned studies are described in the following publications, the disclosure of which are hereby incorporated by reference:
[1164] agase, T.; Ishikawa, K.; Suyama, M.; Kikuno, R.; Hirosawa, M.; Miyajima, N.; Tanaka, A.; Kotani, H.; Nomura, N.; Ohara, O.: Prediction of the coding sequences of unidentified human genes. XII. The complete sequences of 100 new cDNA clones from brain which code for large proteins in vitro. DNA Res. 5: 355-364, 1998. PubMed ID: 10048485 2. Suetsugu, S.; Miki, H.; Takenawa, T.: Identification of two human WAVE/SCAR homologues as general actin regulatory molecules which associate with the Arp2/3 complex. Biochem. Biophys. Res. Commun. 260: 296-302, 1999.

[1165] Further studies establishing the function and utilities of WASF3 are found in John Hopkins OMIM database record ID 605068, and in references numbered 275-276 listed hereinbelow.

[1166] Reference is now made to WASF3 BINDING SITE. WAS protein family, member 3 (WASF3) is a host target gene of VGAM23, corresponding to VGAM23-HOST-TARGET GENE of FIG. 23A. WASF3 BINDING SITE is a host binding site found in the 3′ untranslated region of WASF3, corresponding to HOST BINDING SITE of FIG. 23A. FIG. 23D illustrates the complementarity of the nucleotide sequence of WASF3 BINDING SITE, designated SEQ ID:130, to the nucleotide sequence of VGAM23 RNA of FIG. 23A, designated SEQ ID:122.

[1167] Yet a further function of VGAM23 is therefore inhibition of WAS protein family, member 3 (WASF3), a host gene which encodes a Protein that stimulates actin polymerization, as part of a novel viral mechanism used by Equine herpesvirus 2 for attacking a host. Accordingly, utilities of VGAM23 include diagnosis, prevention and treatment of viral infection by Equine herpesvirus 2.

[1168] The function of WASF3 has been established by previous studies. The actin cytoskeleton plays critical roles in cell morphologic changes and motility. Rho family small GTPases such as Rho (see 165370), RAC (see 602048), and CDC42 (116952) organize the actin cytoskeleton. Other major players in actin-based motility are the 7 members of the ARP2/3 complex (see 604221). The Wiskott-Aldrich syndrome protein (WASP; 301000) and WASP-like (WASL; 605056) are among the downstream effector molecules involved in the transmission of signals from tyrosine kinase receptors and small GTPases to the actin cytoskeleton. WASF1 (605035) is also involved in actin reorganization, but its expression is restricted to brain. By searching an EST database for homologs of WASF1 and by screening cDNA libraries, Suetsugu et al. (1999) identified WASF2 (605068) and WASF3, which they termed WAVE2 and WAVE3, respectively. The predicted 502-amino acid WASF3 protein shares 48% amino acid identity with WASF1. Northern blot analysis revealed that, like WASF1, WASF3 expression is strongest in brain, although weak expression was detected in kidney and liver. SDS-PAGE analysis showed that, like other WASP family members, WASF3 binds actin through its C-terminal verprolin homology (VPH) domain. Immunofluorescence microscopy demonstrated that ectopically expressed WASF3 induces abnormal actin clusters. These actin cluster formations were suppressed by deletion of the VPH domain of WASF3.

[1169] Full details of the abovementioned studies are described in the following publications, the disclosure of which are hereby incorporated by reference:
[1170] agase, T.; Ishikawa, K.; Suyama, M.; Kikuno, R.; Hirosawa, M.; Miyajima, N.; Tanaka, A.; Kotani, H.; Nomura, N.; Ohara, O.: Prediction of the coding sequences of unidentified human genes. XII. The complete sequences of 100 new cDNA clones from brain which code for large proteins in vitro. DNA Res. 5: 355-364, 1998. PubMed ID: 10048485 2. Suetsugu, S.; Miki, H.; Takenawa, T.: Identification of two human WAVE/SCAR homologues as general actin regulatory molecules which associate with the Arp2/3 complex. Biochem. Biophys. Res. Commun. 260: 296-302, 1999.

[1171] Further studies establishing the function and utilities of WASF3 are found in John Hopkins OMIM database record ID 605068, and in references numbered 275-276 listed hereinbelow.

[1172] Reference is now made to WASF3 BINDING SITE. WAS protein family, member 3 (WASF3) is a host target gene of VGAM23, corresponding to VGAM23-HOST-TARGET GENE of FIG. 23A. WASF3 BINDING SITE is a host binding site found in the 3′ untranslated region of WASF3, corresponding to HOST BINDING SITE of FIG. 23A. FIG. 23D illustrates the complementarity of the nucleotide sequence of WASF3 BINDING SITE, designated SEQ ID:130, to the nucleotide sequence of VGAM23 RNA of FIG. 23A, designated SEQ ID:122.

[1173] Yet a further function of VGAM23 is therefore inhibition of WAS protein family, member 3 (WASF3), a host gene which encodes a Protein that stimulates actin polymerization, as part of a novel viral mechanism used by Equine herpesvirus 2 for attacking a host. Accordingly, utilities of VGAM23 include diagnosis, prevention and treatment of viral infection by Equine herpesvirus 2.

[1174] The function of WASF3 has been established by previous studies. The actin cytoskeleton plays critical roles in cell morphologic changes and motility. Rho family small GTPases such as Rho (see 165370), RAC (see 602048), and CDC42 (116952) organize the actin cytoskeleton. Other major players in actin-based motility are the 7 members of the ARP2/3 complex (see 604221). The Wiskott-Aldrich syndrome protein (WASP; 301000) and WASP-like (WASL; 605056) are among the downstream effector molecules involved in the transmission of signals from tyrosine kinase receptors and small GTPases to the actin cytoskeleton. WASF1 (605035) is also involved in actin reorganization, but its expression is restricted to brain. By searching an EST database for homologs of WASF1 and by screening cDNA libraries, Suetsugu et al. (1999) identified WASF2 (605068) and WASF3, which they termed WAVE2 and WAVE3, respectively. The predicted 502-amino acid WASF3 protein shares 48% amino acid identity with WASF1. Northern blot analysis revealed that, like WASF1, WASF3 expression is strongest in brain, although weak expression was detected in kidney and liver. SDS-PAGE analysis showed that, like other WASP family members, WASF3 binds actin through its C-terminal verprolin homology (VPH) domain. Immunofluorescence microscopy demonstrated that ectopically expressed WASF3 induces abnormal actin clusters. These actin cluster formations were suppressed by deletion of the VPH domain of WASF3.

[1175] Full details of the abovementioned studies are described in the following publications, the disclosure of which are hereby incorporated by reference:
[1176] agase, T.; Ishikawa, K.; Suyama, M.; Kikuno, R.; Hirosawa, M.; Miyajima, N.; Tanaka, A.; Kotani, H.; Nomura, N.; Ohara, O.: Prediction of the coding sequences of unidentified human genes. XII. The complete sequences of 100 new cDNA clones from brain which code for large proteins in vitro. DNA Res. 5: 355-364, 1998. PubMed ID: 10048485 2. Suetsugu, S.; Miki, H.; Takenawa, T.: Identification of two human WAVE/SCAR homologues as general actin regulatory molecules which associate with the Arp2/3 complex. Biochem. Biophys. Res. Commun. 260: 296-302, 1999.

[1177] Further studies establishing the function and utilities of WASF3 are found in John Hopkins OMIM database record ID 605068, and in references numbered 275-276 listed hereinbelow.

[1178] Reference is now made to WASF3 BINDING SITE. WAS protein family, member 3 (WASF3) is a host target gene of VGAM23, corresponding to VGAM23-HOST-TARGET GENE of FIG. 23A. WASF3 BINDING SITE is a host binding site found in the 3′ untranslated region of WASF3, corresponding to HOST BINDING SITE of FIG. 23A. FIG. 23D illustrates the complementarity of the nucleotide sequence of WASF3 BINDING SITE, designated SEQ ID:130, to the nucleotide sequence of VGAM23 RNA of FIG. 23A, designated SEQ ID:122.

[1179] Yet a further function of VGAM23 is therefore inhibition of WAS protein family, member 3 (WASF3), a host gene which encodes a Protein that stimulates actin polymerization, as part of a novel viral mechanism used by Equine herpesvirus 2 for attacking a host. Accordingly, utilities of VGAM23 include diagnosis, prevention and treatment of viral infection by Equine herpesvirus 2.

[1180] The function of WASF3 has been established by previous studies. The actin cytoskeleton plays critical roles in cell morphologic changes and motility. Rho family small GTPases such as Rho (see 165370), RAC (see 602048), and CDC42 (116952) organize the actin cytoskeleton. Other major players in actin-based motility are the 7 members of the ARP2/3 complex (see 604221). The Wiskott-Aldrich syndrome protein (WASP; 301000) and WASP-like (WASL; 605056) are among the downstream effector molecules involved in the transmission of signals from tyrosine kinase receptors and small GTPases to the actin cytoskeleton. WASF1 (605035) is also involved in actin reorganization, but its expression is restricted to brain. By searching an EST database for homologs of WASF1 and by screening cDNA libraries, Suetsugu et al. (1999) identified WASF2 (605068) and WASF3, which they termed WAVE2 and WAVE3, respectively. The predicted 502-amino acid WASF3 protein shares 48% amino acid identity with WASF1. Northern blot analysis revealed that, like WASF1, WASF3 expression is strongest in brain, although weak expression was detected in kidney and liver. SDS-PAGE analysis showed that, like other WASP family members, WASF3 binds actin through its C-terminal verprolin homology (VPH) domain. Immunofluorescence microscopy demonstrated that ectopically expressed WASF3 induces abnormal actin clusters. These actin cluster formations were suppressed by deletion of the VPH domain of WASF3.

[1181] Full details of the abovementioned studies are described in the following publications, the disclosure of which are hereby incorporated by reference:
[1182] agase, T.; Ishikawa, K.; Suyama, M.; Kikuno, R.; Hirosawa, M.; Miyajima, N.; Tanaka, A.; Kotani, H.; Nomura, N.; Ohara, O.: Prediction of the coding sequences of unidentified human genes. XII. The complete sequences of 100 new cDNA clones from brain which code for large proteins in vitro. DNA Res. 5: 355-364, 1998. PubMed ID: 10048485 2. Suetsugu, S.; Miki, H.; Takenawa, T.: Identification of two human WAVE/SCAR homologues as general actin regulatory molecules which associate with the Arp2/3 complex. Biochem. Biophys. Res. Commun. 260: 296-302, 1999.

[1183] Further studies establishing the function and utilities of WASF3 are found in John Hopkins OMIM database record ID 605068, and in references numbered 275-276 listed hereinbelow.

[1184] Reference is now made to WASF3 BINDING SITE. WAS protein family, member 3 (WASF3) is a host target gene of VGAM23, corresponding to VGAM23-HOST-TARGET GENE of FIG. 23A. WASF3 BINDING SITE is a host binding site found in the 3′ untranslated region of WASF3, corresponding to HOST BINDING SITE of FIG. 23A. FIG. 23D illustrates the complementarity of the nucleotide sequence of WASF3 BINDING SITE, designated SEQ ID:130, to the nucleotide sequence of VGAM23 RNA of FIG. 23A, designated SEQ ID:122.

[1185] Yet a further function of VGAM23 is therefore inhibition of WAS protein family, member 3 (WASF3), a host gene which encodes a Protein that stimulates actin polymerization, as part of a novel viral mechanism used by Equine herpesvirus 2 for attacking a host. Accordingly, utilities of VGAM23 include diagnosis, prevention and treatment of viral infection by Equine herpesvirus 2.

[1186] The function of WASF3 has been established by previous studies. The actin cytoskeleton plays critical roles in cell morphologic changes and motility. Rho family small GTPases such as Rho (see 165370), RAC (see 602048), and CDC42 (116952) organize the actin cytoskeleton. Other major players in actin-based motility are the 7 members of the ARP2/3 complex (see 604221). The Wiskott-Aldrich syndrome protein (WASP; 301000) and WASP-like (WASL; 605056) are among the downstream effector molecules involved in the transmission of signals from tyrosine kinase receptors and small GTPases to the actin cytoskeleton. WASF1 (605035) is also involved in actin reorganization, but its expression is restricted to brain. By searching an EST database for homologs of WASF1 and by screening cDNA libraries, Suetsugu et al. (1999) identified WASF2 (605068) and WASF3, which they termed WAVE2 and WAVE3, respectively. The predicted 502-amino acid WASF3 protein shares 48% amino acid identity with WASF1. Northern blot analysis revealed that, like WASF1, WASF3 expression is strongest in brain, although weak expression was detected in kidney and liver. SDS-PAGE analysis showed that, like other WASP family members, WASF3 binds actin through its C-terminal verprolin homology (VPH) domain. Immunofluorescence microscopy demonstrated that ectopically expressed WASF3 induces abnormal actin clusters. These actin cluster formations were suppressed by deletion of the VPH domain of WASF3.

[1187] Full details of the abovementioned studies are described in the following publications, the disclosure of which are hereby incorporated by reference:
[1188] agase, T.; Ishikawa, K.; Suyama, M.; Kikuno, R.; Hirosawa, M.; Miyajima, N.; Tanaka, A.; Kotani, H.; Nomura, N.; Ohara, O.: Prediction of the coding sequences of unidentified human genes. XII. The complete sequences of 100 new cDNA clones from brain which code for large proteins in vitro. DNA Res. 5: 355-364, 1998. PubMed ID: 10048485 2. Suetsugu, S.; Miki, H.; Takenawa, T.: Identification of two human WAVE/SCAR homologues as general actin regulatory molecules which associate with the Arp2/3 complex. Biochem. Biophys. Res. Commun. 260: 296-302, 1999.

[1189] Further studies establishing the function and utilities of WASF3 are found in John Hopkins OMIM database record ID 605068, and in references numbered 275-276 listed hereinbelow.

[1190] Reference is now made to WASF3 BINDING SITE. WAS protein family, member 3 (WASF3) is a host target gene of VGAM23, corresponding to VGAM23-HOST-TARGET GENE of FIG. 23A. WASF3 BINDING SITE is a host binding site found in the 3′ untranslated region of WASF3, corresponding to HOST BINDING SITE of FIG. 23A. FIG. 23D illustrates the complementarity of the nucleotide sequence of WASF3 BINDING SITE, designated SEQ ID:130, to the nucleotide sequence of VGAM23 RNA of FIG. 23A, designated SEQ ID:122.

[1191] Yet a further function of VGAM23 is therefore inhibition of WAS protein family, member 3 (WASF3), a host gene which encodes a Protein that stimulates actin polymerization, as part of a novel viral mechanism used by Equine herpesvirus 2 for attacking a host. Accordingly, utilities of VGAM23 include diagnosis, prevention and treatment of viral infection by Equine herpesvirus 2.

[1192] The function of WASF3 has been established by previous studies. The actin cytoskeleton plays critical roles in cell morphologic changes and motility. Rho family small GTPases such as Rho (see 165370), RAC (see 602048), and CDC42 (116952) organize the actin cytoskeleton. Other major players in actin-based motility are the 7 members of the ARP2/3 complex (see 604221). The Wiskott-Aldrich syndrome protein (WASP; 301000) and WASP-like (WASL; 605056) are among the downstream effector molecules involved in the transmission of signals from tyrosine kinase receptors and small GTPases to the actin cytoskeleton. WASF1 (605035) is also involved in actin reorganization, but its expression is restricted to brain. By searching an EST database for homologs of WASF1 and by screening cDNA libraries, Suetsugu et al. (1999) identified WASF2 (605068) and WASF3, which they termed WAVE2 and WAVE3, respectively. The predicted 502-amino acid WASF3 protein shares 48% amino acid identity with WASF1. Northern blot analysis revealed that, like WASF1, WASF3 expression is strongest in brain, although weak expression was detected in kidney and liver. SDS-PAGE analysis showed that, like other WASP family members, WASF3 binds actin through its C-terminal verprolin homology (VPH) domain. Immunofluorescence microscopy demonstrated that ectopically expressed WASF3 induces abnormal actin clusters. These actin cluster formations were suppressed by deletion of the VPH domain of WASF3.

[1193] Full details of the abovementioned studies are described in the following publications, the disclosure of which are hereby incorporated by reference:
[1194] agase, T.; Ishikawa, K.; Suyama, M.; Kikuno, R.; Hirosawa, M.; Miyajima, N.; Tanaka, A.; Kotani, H.; Nomura, N.; Ohara, O.: Prediction of the coding sequences of unidentified human genes. XII. The complete sequences of 100 new cDNA clones from brain which code for large proteins in vitro. DNA Res. 5: 355-364, 1998. PubMed ID: 10048485 2. Suetsugu, S.; Miki, H.; Takenawa, T.: Identification of two human WAVE/SCAR homologues as general actin regulatory molecules which associate with the Arp2/3 complex. Biochem. Biophys. Res. Commun. 260: 296-302, 1999.

[1195] Further studies establishing the function and utilities of WASF3 are found in John Hopkins OMIM database record ID 605068, and in references numbered 275-276 listed hereinbelow.

[1196] Reference is now made to WASF3 BINDING SITE. WAS protein family, member 3 (WASF3) is a host target gene of VGAM23, corresponding to VGAM23-HOST-TARGET GENE of FIG. 23A. WASF3 BINDING SITE is a host binding site found in the 3′ untranslated region of WASF3, corresponding to HOST BINDING SITE of FIG. 23A. FIG. 23D illustrates the complementarity of the nucleotide sequence of WASF3 BINDING SITE, designated SEQ ID:130, to the nucleotide sequence of VGAM23 RNA of FIG. 23A, designated SEQ ID:122.

[1197] Yet a further function of VGAM23 is therefore inhibition of WAS protein family, member 3 (WASF3), a host gene which encodes a Protein that stimulates actin polymerization, as part of a novel viral mechanism used by Equine herpesvirus 2 for attacking a host. Accordingly, utilities of VGAM23 include diagnosis, prevention and treatment of viral infection by Equine herpesvirus 2.

[1198] The function of WASF3 has been established by previous studies. The actin cytoskeleton plays critical roles in cell morphologic changes and motility. Rho family small GTPases such as Rho (see 165370), RAC (see 602048), and CDC42 (116952) organize the actin cytoskeleton. Other major players in actin-based motility are the 7 members of the ARP2/3 complex (see 604221). The Wiskott-Aldrich syndrome protein (WASP; 301000) and WASP-like (WASL; 605056) are among the downstream effector molecules involved in the transmission of signals from tyrosine kinase receptors and small GTPases to the actin cytoskeleton. WASF1 (605035) is also involved in actin reorganization, but its expression is restricted to brain. By searching an EST database for homologs of WASF1 and by screening cDNA libraries, Suetsugu et al. (1999) identified WASF2 (605068) and WASF3, which they termed WAVE2 and WAVE3, respectively. The predicted 502-amino acid WASF3 protein shares 48% amino acid identity with WASF1. Northern blot analysis revealed that, like WASF1, WASF3 expression is strongest in brain, although weak expression was detected in kidney and liver. SDS-PAGE analysis showed that, like other WASP family members, WASF3 binds actin through its C-terminal verprolin homology (VPH) domain. Immunofluorescence microscopy demonstrated that ectopically expressed WASF3 induces abnormal actin clusters. These actin cluster formations were suppressed by deletion of the VPH domain of WASF3.

[1199] Full details of the abovementioned studies are described in the following publications, the disclosure of which are hereby incorporated by reference:
[1200] agase, T.; Ishikawa, K.; Suyama, M.; Kikuno, R.; Hirosawa, M.; Miyajima, N.; Tanaka, A.; Kotani, H.; Nomura, N.; Ohara, O.: Prediction of the coding sequences of unidentified human genes. XII. The complete sequences of 100 new cDNA clones from brain which code for large proteins in vitro. DNA Res. 5: 355-364, 1998. PubMed ID: 10048485 2. Suetsugu, S.; Miki, H.; Takenawa, T.: Identification of two human WAVE/SCAR homologues as general actin regulatory molecules which associate with the Arp2/3 complex. Biochem. Biophys. Res. Commun. 260: 296-302, 1999.

[1201] Further studies establishing the function and utilities of WASF3 are found in John Hopkins OMIM database record ID 605068, and in references numbered 275-276 listed hereinbelow.

[1202] Reference is now made to FIG. 24A, which is a simplified diagram providing a conceptual explanation of the mode by which a novel bioinformatically detected viral gene, referred to here as Viral Genomic Address Messenger 24 (VGAM24) modulates expression of host target genes thereof, the function and utility of which host target genes is known in the art.

[1203] VGAM24 is a novel bioinformatically detected regulatory, non protein coding, viral micro RNA (miRNA) gene. The method by which VGAM24 was detected is described hereinabove with reference to FIGS. 2-8.

[1204] VGAM24 GENE is a viral gene contained in the genome of Melanoplus sanguinipes entomopoxvirus. VGAM24-HOST TARGET GENE is a human gene contained in the human genome.

[1205] VGAM24 GENE encodes a VGAM24 PRECURSOR RNA. Similar to other miRNA genes, and unlike most ordinary genes, the RNA transcribed by VGAM24, VGAM24 PRECURSOR RNA, does not encoded a protein.

[1206] VGAM24 PRECURSOR RNA folds onto itself, forming VGAM24 FOLDED PRECURSOR RNA. As FIG. 24 illustrates, VGAM24 FOLDED PRECURSOR RNA forms a ‘hairpin structure’, folding onto itself. As is well known in the art, this ‘hairpin structure’, is typical of RNA encoded by miRNA genes, and is due to the fact that the nucleotide sequence of the first half of the RNA encoded by a miRNA gene is an accurate or partial inversed-reversed sequence of the nucleotide sequence of the second half thereof. By “inversed-reversed” is meant a sequence which is reversed and wherein each nucleotide is replaced by a complimentary nucleotide, as is well known in the art (e.g. ATGGC is the inversed-reversed sequence of GCCAT).

[1207] An enzyme complex designated DICER COMPLEX, ‘dices’ the VGAM24 FOLDED PRECURSOR RNA into a single stranded ˜22 nt long RNA segment, designated VGAM24 RNA. As is known in the art, ‘dicing’ of a hairpin structured RNA precursor product into short a ˜22 nt RNA segment is catalyzed by an enzyme complex comprising an enzyme called Dicer together with other necessary proteins.

[1208] VGAM24-HOST TARGET GENE encodes a corresponding messenger RNA, designated VGAM24-HOST-TARGET RNA. VGAM24-HOST-TARGET RNA comprises three regions, as is typical of mRNA of a protein coding gene: a 5′ untranslated region, a protein coding region and a 3′ untranslated region, designated 5′UTR, PROTEIN CODING and 3′UTR respectively.

[1209] VGAM24 RNA binds complimentarily to a HOST BINDING SITE, located on an untranslated region of VGAM24-HOST-TARGET RNA. This complimentarily binding is due to the fact that the nucleotide sequence of VGAM24 RNA is an accurate or a partial inversed-reversed sequence of the nucleotide sequence of HOST BINDING SITE. It is appreciated that while FIG. 24A depicts the HOST BINDING SITE on the 3′UTR region, this is meant as an example only—the HOST BINDING SITE may be located on the 5′UTR region as well.

[1210] The complimentary binding of VGAM24 RNA to HOST BINDING SITE inhibits translation of VGAM24-HOST-TARGET RNA into VGAM24-HOST-TARGET PROTEIN. VGAM24-HOST-TARGET PROTEIN is therefore outlined by a broken line.

[1211] It is appreciated that VGAM24-HOST-TARGET GENE in fact represents a plurality of host target genes of VGAM24. The mRNA of each of this plurality of host target genes of VGAM24 comprises a HOST BINDING SITE, having a nucleotide sequence which is at least partly complementary to VGAM24 RNA, and which when bound by VGAM24 RNA causes inhibition of translation of one of a plurality of host target proteins of VGAM24. The plurality of host target genes of VGAM24 and their respective host binding sites, are described hereinbelow with reference to FIG. 24D.

[1212] It is appreciated by one skilled in the art that the mode of translational inhibition illustrated by FIG. 24A with specific reference to translational inhibition exerted by VGAM24 on one or more host target genes of VGAM24, is in fact common to other known miRNA genes. As mentioned hereinabove with reference to the background section, although a specific complimentary binding site has been demonstrated only for miRNA genes Lin-4 and Let-7, all other recently discovered miRNA genes are also believed by those skilled in the art to modulate expression of other genes by complimentary binding, although specific complimentary binding sites of these genes have not yet been found (Ruvkun G., ‘Perspective: Glimpses of a tiny RNA world’, Science 294, 779 (2001)).

[1213] It is further appreciated that a function of VGAM24 is inhibition of expression of host target genes, as part of a novel viral mechanism of attacking a host. Accordingly, utilities of VGAM24 include diagnosis, prevention and treatment of viral infection by Melanoplus sanguinipes entomopoxvirus.

[1214] Reference is now made to FIG. 24B which shows the nucleotide sequence of VGAM24 PRECURSOR RNA of FIG. 24A, designated SEQ ID:135, and a probable nucleotide sequence of VGAM24 RNA of FIG. 24A, designated SEQ ID:136. The nucleotide sequence of SEQ ID:136, which is highly likely (over 28%) to be identical or highly similar to that of VGAM24, is marked by an underline within the sequence of VGAM24 PRECURSOR RNA.

[1215] Reference is now made to FIG. 24C, which shows the secondary folding of VGAM24 PRECURSOR RNA, forming a ‘hairpin structure’ designated VGAM24 FOLDED PRECURSOR RNA, both of FIG. 24A. A probable (>28%) nucleotide sequence of VGAM24 RNA, designated SEQ ID:136 of FIG. 24B, is marked by an underline on VGAM24 FOLDED PRECURSOR RNA. It is appreciated that the complimentary base-paring is not perfect, with ‘bulges’, as is well known in the art with respect to the RNA folding of all known miRNA genes.

[1216] Reference is now made to FIG. 24D, which is a table showing binding sites found in untranslated regions of a plurality of host target genes of VGAM24, each binding site corresponding to HOST BINDING SITE of FIG. 24A, and their complementarity to SEQ ID:136, which is highly likely (>28%) to be identical or highly similar to the nucleotide sequence of VGAM24 RNA of FIG. 24A.

[1217] As mentioned hereinabove with reference to FIG. 24A a function of VGAM24 is inhibition of expression of host target genes, as part of a novel viral mechanism of attacking a host. Accordingly, utilities of VGAM24 include diagnosis, prevention and treatment of viral infection by Melanoplus sanguinipes entomopoxvirus. It is appreciated that specific functions, and accordingly utilities, of VGAM24 correlate with, and may be deduced from, the identity of the host target genes which VGAM24 binds and inhibits, and the function of these host target genes, as elaborated hereinbelow.

[1218] Reference is now made to PDGFRA BINDING SITE. platelet-derived growth factor receptor, alpha polypeptide (PDGFRA) is a host target gene of VGAM24, corresponding to VGAM24-HOST TARGET GENE of FIG. 24A. PDGFRA BINDING SITE is a host binding site found in the 3′ untranslated region of PDGFRA, corresponding to HOST BINDING SITE of FIG. 24A. FIG. 24D illustrates the complementarity of the nucleotide sequence of PDGFRA BINDING SITE, designated SEQ ID:137, to the nucleotide sequence of VGAM24 RNA of FIG. 24A, designated SEQ ID:136.

[1219] A function of VGAM24 is therefore inhibition of platelet-derived growth factor receptor, alpha polypeptide (PDGFRA), a host gene which encodes a receptor that this receptor binds platelet-derived growth factor and has a tyrosine-protein kinase activity. and is associated with basal cell carcinomas, as part of a novel viral mechanism used by Melanoplus sanguinipes entomopoxvirus for attacking a host. Accordingly, utilities of VGAM24 include diagnosis, prevention and treatment of viral infection by Melanoplus sanguinipes entomopoxvirus.

[1220] The function of PDGFRA has been established by previous studies. Considerable insight into the role of the sonic hedgehog (600725) pathway in vertebrate development and human cancers came from the discovery that mutations in ‘patched’ (PTCH; 601309) are associated with basal cell nevus syndrome (BCNS; 109400), an autosomal dominant disorder combining developmental anomalies and tumors, particularly basal cell carcinomas (BCCs). Sporadic BCCs, the most common human cancer, consistently have abnormalities in the hedgehog pathway, and often mutations in PTCH. In addition, somatic mutations in ‘smoothened’ (SMOH; 601500), another protein in the hedgehog pathway, occur in sporadic BCCs. The downstream molecule GLI1 (165220) is known to mediate the biologic effect of the hedgehog pathway and is itself upregulated in all BCCs. Gli1 can drive the production of BCCs in the mouse when overexpressed in the epidermis. Xie et al. (2001) showed that GLI1 can activate PDGFR-alpha and that functional upregulation of PDGFR-alpha by GLI1 is accompanied by activation of the Ras-ERK pathway, which is associated with cell proliferation. The relevance of this mechanism in vivo is supported by a high level of expression of PDGFR-alpha in BCCs in mice and humans. From these and other observations, Xie et al. (2001) concluded that increased expression of the PDGFR-alpha gene may be an important mechanism by which mutations in the hedgehog pathway cause BCCs.

[1221] Animal model experiments lend further support to the function of PDGFRA. Klinghoffer et al. (2001) created 2 complementary lines of knockin mice in which the intracellular signaling domains of one PDGFR had been removed and replaced by those of the other PDGFR. While both lines demonstrated substantial rescue of normal development, substitution of the Pdgfrb signaling domains with those of Pdgfra resulted in varying degrees of vascular disease.

[1222] It is appreciated that the abovementioned animal model for PDGFRA is acknowledged by those skilled in the art as a scientifically valid animal model, as can be further appreciated from the publications sited hereinbelow.

[1223] Full details of the abovementioned studies are described in the following publications, the disclosure of which are hereby incorporated by reference:
[1224] Xie, J.; Aszterbaum, M.; Zhang, X.; Bonifas, J. M.; Zachary, C.; Epstein, E.; McCormick, F.: A role of PDGFR-alpha in basal cell carcinoma proliferation. Proc. Nat. Acad. Sci. 98: 9255-9259, 2001. PubMed ID: 11481486 10. Klinghoffer, R. A.; Mueting-Nelsen, P. F.; Faerman, A.; Shani, M.; Soriano, P.: The two PDGF receptors maintain conserved signaling in vivo despite divergent embryological functions. Molec. Cell 7: 343-354, 2001.

[1225] Further studies establishing the function and utilities of PDGFRA are found in John Hopkins OMIM database record ID 173490, and in references numbered 277-293 listed hereinbelow.

[1226] Reference is now made to PDGFRA BINDING SITE. platelet-derived growth factor receptor, alpha polypeptide (PDGFRA) is a host target gene of VGAM24, corresponding to VGAM24-HOST TARGET GENE of FIG. 24A. PDGFRA BINDING SITE is a host binding site found in the 3′ untranslated region of PDGFRA, corresponding to HOST BINDING SITE of FIG. 24A. FIG. 24D illustrates the complementarity of the nucleotide sequence of PDGFRA BINDING SITE, designated SEQ ID:137, to the nucleotide sequence of VGAM24 RNA of FIG. 24A, designated SEQ ID:136.

[1227] a function of VGAM24 is therefore inhibition of platelet-derived growth factor receptor, alpha polypeptide (PDGFRA), a host gene which encodes a receptor that this receptor binds platelet-derived growth factor and has a tyrosine-protein kinase activity. and is associated with basal cell carcinomas, as part of a novel viral mechanism used by Melanoplus sanguinipes entomopoxvirus for attacking a host. Accordingly, utilities of VGAM24 include diagnosis, prevention and treatment of viral infection by Melanoplus sanguinipes entomopoxvirus.

[1228] The function of PDGFRA has been established by previous studies. Considerable insight into the role of the sonic hedgehog (600725) pathway in vertebrate development and human cancers came from the discovery that mutations in ‘patched’ (PTCH; 601309) are associated with basal cell nevus syndrome (BCNS; 109400), an autosomal dominant disorder combining developmental anomalies and tumors, particularly basal cell carcinomas (BCCs). Sporadic BCCs, the most common human cancer, consistently have abnormalities in the hedgehog pathway, and often mutations in PTCH. In addition, somatic mutations in ‘smoothened’ (SMOH; 601500), another protein in the hedgehog pathway, occur in sporadic BCCs. The downstream molecule GLI1 (165220) is known to mediate the biologic effect of the hedgehog pathway and is itself upregulated in all BCCs. Gli1 can drive the production of BCCs in the mouse when overexpressed in the epidermis. Xie et al. (2001) showed that GLI1 can activate PDGFR-alpha and that functional upregulation of PDGFR-alpha by GLI1 is accompanied by activation of the Ras-ERK pathway, which is associated with cell proliferation. The relevance of this mechanism in vivo is supported by a high level of expression of PDGFR-alpha in BCCs in mice and humans. From these and other observations, Xie et al. (2001) concluded that increased expression of the PDGFR-alpha gene may be an important mechanism by which mutations in the hedgehog pathway cause BCCs.

[1229] Animal model experiments lend further support to the function of PDGFRA. Klinghoffer et al. (2001) created 2 complementary lines of knockin mice in which the intracellular signaling domains of one PDGFR had been removed and replaced by those of the other PDGFR. While both lines demonstrated substantial rescue of normal development, substitution of the Pdgfrb signaling domains with those of Pdgfra resulted in varying degrees of vascular disease.

[1230] It is appreciated that the abovementioned animal model for PDGFRA is acknowledged by those skilled in the art as a scientifically valid animal model, as can be further appreciated from the publications sited hereinbelow.

[1231] Full details of the abovementioned studies are described in the following publications, the disclosure of which are hereby incorporated by reference:
[1232] Xie, J.; Aszterbaum, M.; Zhang, X.; Bonifas, J. M.; Zachary, C.; Epstein, E.; McCormick, F.: A role of PDGFR-alpha in basal cell carcinoma proliferation. Proc. Nat. Acad. Sci. 98: 9255-9259, 2001. PubMed ID: 11481486 10. Klinghoffer, R. A.; Mueting-Nelsen, P. F.; Faerman, A.; Shani, M.; Soriano, P.: The two PDGF receptors maintain conserved signaling in vivo despite divergent embryological functions. Molec. Cell 7: 343-354, 2001.

[1233] Further studies establishing the function and utilities of PDGFRA are found in John Hopkins OMIM database record ID 173490, and in references numbered 277-293 listed hereinbelow.

[1234] Reference is now made to FIG. 3088, which is a simplified diagram describing a novel bioinformatically detected viral regulatory gene, referred to here as GR2, which encodes an ‘operon-like’ cluster of novel miRNA-like genes, each modulating expression of a plurality of target host genes, the function and utility of which target genes is known in the art.

[1235] GR2 GENE (Genomic Record 2 Gene) is a novel bioinformatically detected viral regulatory, non protein coding, RNA gene. The method by which GR2 was detected is described hereinabove with reference to FIGS. 2-8.

[1236] GR2 GENE encodes an RNA molecule, typically several hundred nucleotides long, designated GR2 PRECURSOR RNA.

[1237] GR2 PRECURSOR RNA folds spatially, as illustrated by GR2 FOLDED PRECURSOR RNA, into a plurality of what is known in the art as ‘hair-pin’ structures. The nucleotide sequence of GR2 PRECURSOR RNA comprises a plurality of segments, the first half of each such segment having a nucleotide sequence which is at least a partial inversed-reversed sequence of the second half thereof, thereby causing formation of a plurality of ‘hairpin’ structures, as is well known in the art.

[1238] GR2 FOLDED PRECURSOR RNA is naturally processed by cellular enzymatic activity, into at least 8 separate hairpin shaped RNA segments, each corresponding to VGAM PRECURSOR RNA, designated VGAM25 PRECURSOR, VGAM26 PRECURSOR, VGAM27 PRECURSOR, VGAM28 PRECURSOR, VGAM29 PRECURSOR, VGAM30 PRECURSOR, VGAM31 PRECURSOR and VGAM32 PRECURSOR respectively.

[1239] The above mentioned VGAM precursors, are diced by Dicer of FIG. 8, yielding short RNA segments of about 22 nucleotides in length, each corresponding to VGAM RNA of FIG. 8, designated VGAM25, VGAM26, VGAM27, VGAM28, VGAM29, VGAM30, VGAM31 and VGAM32 respectively.

[1240] VGAM25 binds complimentarily to a binding site located in an untranslated region of VGAM25-TARGET RNA, which binding site corresponds to HOST BINDING SITE of FIG. 25A, thereby inhibiting translation of VGAM25-TARGET RNA into VGAM25-TARGET PROTEIN, both of FIG. 25A. The host target genes of VGAM25 and their respective functions, and accordingly the function and utility of VGAM25 as part of a novel viral mechanism of attacking a host are described hereinabove with reference to FIG. 25D, and include diagnosis, prevention and treatment of viral infection by Equine herpesvirus 2.

[1241] VGAM26 binds complimentarily to a binding site located in an untranslated region of VGAM26-TARGET RNA, which binding site corresponds to HOST BINDING SITE of FIG. 26A, thereby inhibiting translation of VGAM26-TARGET RNA into VGAM26-TARGET PROTEIN, both of FIG. 26A. The host target genes of VGAM26 and their respective functions, and accordingly the function and utility of VGAM26 as part of a novel viral mechanism of attacking a host are described hereinabove with reference to FIG. 26D, and include diagnosis, prevention and treatment of viral infection by Equine herpesvirus 2

[1242] VGAM27 binds complimentarily to a binding site located in an untranslated region of VGAM27-TARGET RNA, which binding site corresponds to HOST BINDING SITE of FIG. 27A, thereby inhibiting translation of VGAM27-TARGET RNA into VGAM27-TARGET PROTEIN, both of FIG. 27A. The host target genes of VGAM27 and their respective functions, and accordingly the function and utility of VGAM27 as part of a novel viral mechanism of attacking a host are described hereinabove with reference to FIG. 27D, and include diagnosis, prevention and treatment of viral infection by Equine herpesvirus 2

[1243] VGAM28 binds complimentarily to a binding site located in an untranslated region of VGAM28-TARGET RNA, which binding site corresponds to HOST BINDING SITE of FIG. 28A, thereby inhibiting translation of VGAM28-TARGET RNA into VGAM28-TARGET PROTEIN, both of FIG. 28A. The host target genes of VGAM28 and their respective functions, and accordingly the function and utility of VGAM28 as part of a novel viral mechanism of attacking a host are described hereinabove with reference to FIG. 28D, and include diagnosis, prevention and treatment of viral infection by Equine herpesvirus 2.

[1244] VGAM29 binds complimentarily to a binding site located in an untranslated region of VGAM29-TARGET RNA, which binding site corresponds to HOST BINDING SITE of FIG. 29A, thereby inhibiting translation of VGAM29-TARGET RNA into VGAM29-TARGET PROTEIN, both of FIG. 29A. The host target genes of VGAM29 and their respective functions, and accordingly the function and utility of VGAM29 as part of a novel viral mechanism of attacking a host are described hereinabove with reference to FIG. 29D, and include diagnosis, prevention and treatment of viral infection by Equine herpesvirus 2

[1245] VGAM30 binds complimentarily to a binding site located in an untranslated region of VGAM30-TARGET RNA, which binding site corresponds to HOST BINDING SITE of FIG. 30A, thereby inhibiting translation of VGAM30-TARGET RNA into VGAM30-TARGET PROTEIN, both of FIG. 30A. The host target genes of VGAM30 and their respective functions, and accordingly the function and utility of VGAM30 as part of a novel viral mechanism of attacking a host are described hereinabove with reference to FIG. 30D, and include diagnosis, prevention and treatment of viral infection by Equine herpesvirus 2

[1246] VGAM31 binds complimentarily to a binding site located in an untranslated region of VGAM31-TARGET RNA, which binding site corresponds to HOST BINDING SITE of FIG. 31A, thereby inhibiting translation of VGAM31-TARGET RNA into VGAM31-TARGET PROTEIN, both of FIG. 31A. The host target genes of VGAM31 and their respective functions, and accordingly the function and utility of VGAM31 as part of a novel viral mechanism of attacking a host are described hereinabove with reference to FIG. 31D, and include diagnosis, prevention and treatment of viral infection by Equine herpesvirus 2

[1247] VGAM32 binds complimentarily to a binding site located in an untranslated region of VGAM32-TARGET RNA, which binding site corresponds to HOST BINDING SITE of FIG. 32A, thereby inhibiting translation of VGAM32-TARGET RNA into VGAM32-TARGET PROTEIN, both of FIG. 32A. The host target genes of VGAM32 and their respective functions, and accordingly the function and utility of VGAM32 as part of a novel viral mechanism of attacking a host are described hereinabove with reference to FIG. 32D, and include diagnosis, prevention and treatment of viral infection by Equine herpesvirus 2

[1248] Additional 1046 novel viral genes disclosed by the present invention are described with reference to FIGS. 25 through 1000 and 3088 through 3308, which Figs. and description thereof is enclosed in computer readable form.

[1249] It is appreciated by persons skilled in the art that the present invention is not limited by what has been particularly shown and described hereinabove. Rather the scope of the present invention includes both combinations and subcombinations of the various features described hereinabove as well as variations and modifications which would occur to persons skilled in the art upon reading the specifications and which are not in the prior art.

### BIBLIOGRAPHY

[1250] 1. Lesage, F.; Maingret, F.; Lazdunski, M.: Cloning and expression of human TRAAK, a polyunsaturated fatty acids-activated and mechano-sensitive K+ channel. FEBS Lett. 471: 137-140, 2000.
[1251] 2. De Deken, X.; Wang, D.; Many, M.-C.; Costagliola, S.; Libert, F.; Vassart, G.; Dumont, J. E.; Miot, F.: Cloning of two human thyroid cDNAs encoding new members of the NADPH oxidase family. J. Biol. Chem. 275: 23227-23233, 2000.
[1252] 3. Lacroix, L.; Nocera, M.; Mian, C.; Caillou, B.; Virion, A.; Dupuy, C.; Filetti, S.; Bidart, J. M.; Schlumberger, M.: Expression of nicotinamide adenine dinucleotide phosphate oxidase flavoprotein DUOX genes and proteins in human papillary and follicular thyroid carcinomas. Thyroid 11: 1017-1023, 2001.
[1253] 4. Chan, J.; Watt, V. M.: Eek and erk, new members of the eph subclass of receptor protein-tyrosine kinases. Oncogene 6: 1057-1061, 1991.
[1254] 5. Park, S.; Frisen, J.; Barbacid, M.: Aberrant axonal projections in mice lacking EphA8 (Eek) tyrosine protein kinase receptors. EMBO J. 16: 3106-3114, 1997.
[1255] 6. Hayashida, S.; Yamasaki, K.; Asada, Y.; Soeda, E.; Niikawa, N.; Kishino, T.: Construction of a physical and transcript map flanking the imprinted MEST/PEG1 region at 7q32. Genomics 66: 221-225, 2000.
[1256] 7. Kaiser, P.; Seufert, W.; Hofferer, L.; Kofler, B.; Sachsenmaier, C.; Herzog, H.; Jentsch, S.; Schweiger, M.; Schneider, R.: Human ubiquitin-conjugating enzyme homologous to yeast UBC8. J. Biol. Chem. 269: 8797-8802, 1994.
[1257] 8. Di Marzo, V.; Goparaju, S. K.; Wang, L.; Liu, J.; Batkai, S.; Jarai, Z.; Fezza, F.; Miura, G. I.; Palmiter, R. D.; Sugiura, T.; Kunos, G.: Leptin-regulated endocannabinoids are involved in maintaining food intake. Nature 410: 822-825, 2001.
[1258] 9. Gerard, C. M.; Mollereau, C.; Vassart, G.; Parmentier, M.: Molecular cloning of a human cannabinoid receptor which is also expressed in testis. Biochem. J. 279: 129-134, 1991.
[1259] 10. Hoehe, M. R.; Caenazzo, L.; Martinez, M. M.; Hsieh, W.-T.; Modi, W. S.; Gershon, E. S.; Bonner, T. I.: Genetic and physical mapping of the human cannabinoid receptor gene to chromosome 6q14-q15. New Biologist 3: 880-885, 1991.
[1260] 11. Ledent, C.; Valverde, O.; Cossu, G.; Petitet, F.; Aubert, J.-F.; Beslot, F.; Bohme, G. A.; Imperato, A.; Pedrazzini, T.; Rogues, B. P.; Vassart, G.; Fratta, W.; Parmentier, M.: Unresponsiveness to cannabinoids and reduced addictive effects of opiates in CB(1) receptor knockout mice. Science 283 401-404, 1999.
[1261] 12. Marsicano, G.; Wotjak, C. T.; Azad, S. C.; Bisogno, T.; Rammes, G.; Cascio, M. G.; Hermann, H.; Tang, J.; Hofmann, C.; Zieglgansberger, W.; Di Marzo, V.; Lutz, B.: The endogenous cannabinoid system controls extinction of aversive memories. Nature 418: 530-534, 2002.
[1262] 13. Matsuda, L. A.; Lolait, S. J.; Brownstein, M. J.; Young, A. C.; Bonner, T. I.: Structure of a cannabinoid receptor and functional expression of the cloned cDNA. Nature 346: 561-564, 1990.
[1263] 14. Modi, W. S.; Bonner, T. I.: Localization of the cannabanoid (sic) receptor locus using non-isotopic in situ hybridization. (Abstract) Cytogenet. Cell Genet. 58: 1915 only, 1991.
[1264] 15. Panikashvili, D.; Simeonidou, C.; Ben-Shabat, S.; Hanus, L.; Breuer, A.; Mechoulam, R.; Shohami, E.: An endogenous cannabinoid (2-AG) is neuroprotective after brain injury. Nature 413: 527-531, 2001.
[1265] 16. Hall, C. R.; Cole, W. G.; Haynes, R.; Hecht, J. T.: Reevaluation of a genetic model for the development of exostosis in hereditary multiple exostosis. Am. J. Med. Genet. 112: 1-5, 2002.
[1266] 17. Kim, B.-T.; Kitagawa, H.; Tamura, J.; Saito, T.; Kusche-Gullberg, M.; Lindahl, U.; Sugahara, K.: Human tumor suppressor EXT gene family members EXTL1 and EXTL3 encode alpha-1,4-N-acetylglucosaminyltransferases that likely are involved in heparan sulfate/heparin biosynthesis. Proc. Nat. Acad. Sci. 98: 7176-7181, 2001.
[1267] 18. Wise, C. A.; Clines, G. A.; Massa, H.; Trask, B. J.; Lovett, M.: Identification and localization of the gene for EXTL, a third member of the multiple exostoses gene family. Genome Res. 7: 10-16, 1997.
[1268] 19. Xu, L.; Xia, J.; Jiang, H.; Zhou, J.; Li, H.; Wang, D.; Pan, Q.; Long, Z.; Fan, C.; Deng, H.-X.: Mutation analysis of hereditary multiple exostoses in the Chinese. Hum. Genet. 105: 45-50, 1999.
[1269] 20. Banfi, S.; Borsani, G.; Bulfone, A.; Ballabio, A.: Drosophila-related expressed sequences. Hum. Molec. Genet. 6: 1745-1753, 1997.
[1270] 21. Bione, S.; Sala, C.; Manzini, C.; Arrigo, G.; Zuffardi, O.; Banfi, S.; Borsani, G.; Jonveaux, P.; Philippe, C.; Zuccotti, M.; Ballabio, A.; Toniolo, D.: A human homologue of the Drosophila melanogaster diaphanous gene is disrupted in a patient with premature ovarian failure: evidence for conserved function in oogenesis and implications for human sterility. Am. J. Hum. Genet. 62: 533-541, 1998.
[1271] 22. Castrillon, D. H.; Wasserman, S. A.: Diaphanous is required for cytokinesis in Drosophila and shares domains of similarity with the products of the limb deformity gene. Development 120: 3367-3377, 1994.
[1272] 23. Lynch, E. D.; Lee, M. K.; Morrow, J. E.; Welcsh, P. L.; Leon, P. E.; King, M.-C.: Nonsyndromic deafness DFNA1 associated with mutation of the human homolog of the Drosophila gene diaphanous. Science 278: 1315-1318, 1997.
[1273] 24. Philippe, C.; Cremers, F. P. M.; Chery, M.; Bach, I.; Abbadi, N.; Ropers, H. H.; Gilgenkrantz, S.: Physical mapping of DNA markers in the q13-q22 region of the human X chromosome. Genomics 17: 147-152, 1993.
[1274] 25. Sala, C.; Arrigo, G.; Toni, G.; Martinazzi, F.; Riva, P.; Larizza, L.; Philippe, C.; Jonveaux, P.; Sloan, F.; Labella, T.; Toniolo, D.: Eleven X chromosome breakpoints associated with premature ovarian failure (POF) map to a 15-Mb YAC contig spanning Xq21. Genomics 40: 123-131, 1997.
[1275] 26. Cowan, C. A.; Yokoyama, N.; Bianchi, L. M.; Henkemeyer, M.; Fritzsch, B.: EphB2 guides axons at the midline and is necessary for normal vestibular function. Neuron 26: 417-430, 2000.
[1276] 27. Fox, G. M.; Hoist, P. L.; Chute, H. T.; Lindberg, R. A.; Janssen, A. M.; Basu, R.; Welcher, A. A.: cDNA cloning and tissue distribution of five human EPH-like receptor protein-tyrosine kinases. Oncogene 10: 897-905, 1995.
[1277] 28. Ghosh, A.: Learning more about NMDA receptor regulation. Science 295: 449-451, 2002.
[1278] 29. Grunwald, I. C.; Korte, M.; Wolfer, D.; Wilkinson, G. A.; Unsicker, K.; Lipp, H.-P.; Bonhoeffer, T.; Klein, R.: Kinase-independent requirement of EphB2 receptors in hippocampal synaptic plasticity. Neuron 32: 1027-1040, 2001.
[1279] 30. Halford, M. M.; Armes, J.; Buchert, M.; Meskenaite, V.; Grail, D.; Hibbs, M. L.; Wilks, A. F.; Farlie, P. G.; Newgreen, D. F.; Hovens, C. M.; Stacker, S. A.: Ryk-deficient mice exhibit craniofacial defects associated with perturbed Eph receptor crosstalk. Nature Genet. 25: 414-418, 2000.
[1280] 31. Henderson, J. T.; Georgiou, J.; Jia, Z.; Robertson, J.; Elowe, S.; Roder, J. C.; Pawson, T.: The receptor tyrosine kinase EphB2 regulates NMDA-dependent synaptic function. Neuron 32: 1041-1056, 2001.
[1281] 32. Henkemeyer, M.; Orioli, D.; Henderson, J. T.; Saxton, T. M.; Roder, J.; Pawson, T.; Klein, R.: Nuk controls pathfinding of commissural axons in the mammalian central nervous system. Cell 86: 35-46, 1996.
[1282] 33. Himanen, J.-P.; Rajashankar, K. R.; Lackmann, M.; Cowan, C. A.; Henkemeyer, M.; Nikolov, D. B.: Crystal structure of an Eph receptor-ephrin complex. Nature 414: 933-938, 2001.
[1283] 34. Ikegaki, N.; Tang, X. X.; Liu, X.-G.; Biegel, J. A.; Allen, C.; Yoshioka, A.; Sulman, E. P.; Brodeur, G. M.; Pleasure, D. E.: Molecular characterization and chromosomal localization of DRT (EPHT3): a developmentally regulated human protein-tyrosine kinase gene of the EPH family. Hum. Molec. Genet. 4: 2033-2045, 1995.
[1284] 35. Saito, T.; Seki, N.; Matsuda, Y.; Kitahara, M.; Murata, M.; Kanda, N.; Nomura, N.; Yamamoto, T.; Hori, T.: Identification of the human ERK gene as a putative receptor tyrosine kinase and its chromosomal localization to 1p36.1: a comparative mapping of human, mouse, and rat chromosomes. Genomics 26: 382-384, 1995.
[1285] 36. Takasu, M. A.; Dalva, M. B.; Zigmond, R. E.; Greenberg, M. E.: Modulation of NMDA receptor-dependent calcium influx and gene expression through EphB receptors. Science 295: 491-495, 2002.
[1286] 37. Wybenga-Groot, L. E.; Baskin, B.; Ong, S. H.; Tong, J.; Pawson, T.; Sicheri, F.: Structural basis for autoinhibition of the EphB2 receptor tyrosine kinase by the unphosphorylated juxtamembrane region. Cell 106: 745-757, 2001.
[1287] 38. Harder, K. W.; Parsons, L. M.; Armes, J.; Evans, N.; Kountouri, N.; Clark, R.; Quillici, C.; Grail, D.; Hodgson, G. S.; Dunn, A. R.; Hibbs, M. L.: Gain- and loss-of-function Lyn mutant mice define a critical inhibitory role for Lyn in the myeloid lineage. Immunity 15: 603-615, 2001.
[1288] 39. Hasegawa, M.; Fujimoto, M.; Poe, J. C.; Steeber, D. A.; Lowell, C. A.; Tedder, T. F.: A CD19-dependent signaling pathway regulates autoimmunity in Lyn-deficient mice. J. Immun. 167: 2469-2478, 2001.
[1289] 40. Hibbs, M. L.; Tarlinton, D. M.; Armes, J.; Grail, D.; Hodgson, G.; Maglitto, R.; Stacker, S. A.; Dunn, A. R.: Multiple defects in the immune system of Lyn-deficient mice, culminating in autoimmune disease. Cell 83: 301-311, 1995.
[1290] 41. Parravicini, V.; Gadina, M.; Kovarova, M.; Odom, S.; Gonzalez-Espinosa, C.; Furumoto, Y.; Saitoh, S.; Samelson, L. E.; O'Shea, J. J.; Rivera, J.: Fyn kinase initiates complementary signals required for IgE-dependent mast cell degranulation. Nature Immun. 3: 741-748, 2002.
[1291] 42. Webster, M. A.; Cardiff, R. D.; Muller, W. J.: Induction of mammary epithelial hyperplasias and mammary tumors in transgenic mice expressing a murine mammary tumor virus/activated c-src fusion gene. Proc. Nat. Acad. Sci. 92: 7849-7853, 1995.
[1292] 43. Yamanashi, Y.; Fukushige, S.-I.; Semba, K.; Sukegawa, J.; Miyajima, N.; Matsubara, K.-I.; Yamamoto, T.; Toyoshima, K.: The yes-related cellular gene lyn encodes a possible tyrosine kinase similar to p56(lck). Molec. Cell. Biol. 7: 237-243, 1987.
[1293] 44. Cavailles, V.; Dauvois, S.; Horset, L. F.; Lopez, G.; Hoare, S.; Kushner, P. J.; Parker, M. G.: Nuclear factor RIP140 modulates transcriptional activation by the estrogen receptor. EMBO J. 14: 3741-3751, 1995.
[1294] 45. Katsanis, N.; Ives, J. H.; Groet, J.; Nizetic, D.; Fisher, E. M. C.: Localisation of receptor interacting protein 140 (RIP140) within 100 kb of D21S13 on 21q11, a gene-poor region of the human genome. Hum. Genet. 102: 221-223, 1998.
[1295] 46. Cohen, D. E.; Green, R. M.; Wu, M. K.; Beier, D. R.: Cloning, tissue-specific expression, gene structure and chromosomal localization of human phosphatidylcholine transfer protein. Biochim. Biophys. Acta 1447: 265-270, 1999.
[1296] 47. van Helvoort, A.; de Brouwer, A.; Ottenhoff, R.; Brouwers, J. F. H. M.; Wijnholds, J.; Beijnen, J. H.; Rijneveld, A.; van der Valk, M. A.; Majoor, D.; Voorhout, W.; Wirtz, K. W. A.; Elferink, R. P. J. O.; Borst, P.: Mice without phosphatidylcholine transfer protein have no defects in the secretion of phosphatidylcholine into bile or into lung airspaces. Proc. Nat. Acad. Sci. 96: 11501-11506, 1999.
[1297] 48. Shimizu, K.; Kawabe, H.; Minimi, S.; Honda, T.; Takaishi, K.; Shirataki, H.; Takai, Y.: SMAP, an 5 mg GDS-associating protein having arm repeats and phosphorylated by Src tyrosine kinase. J. Biol. Chem. 271: 27013-27017, 1996.
[1298] 49. Hampe, W.; Rezgaoui, M.; Hermans-Borgmeyer, I.; Schaller, H. C.: The genes for the human VPS10 domain-containing receptors are large and contain many small exons. Hum. Genet. 108: 529-536, 2001.
[1299] 50. Hermey, G.; Riedel, I. B.; Hampe, W.; Schaller, H. C.; Hermans-Borgmeyer, I.: Identification and characterization of S or CS, a third member of a novel receptor family. Biochem. Biophys. Res. Commun. 266: 347-351, 1999.
[1300] 51. Rezgaoui, M.; Hermey, G.; Riedel, I. B.; Hampe, W.; Schaller, H. C.; Hermans-Borgmeyer, I.: Identification of S or CS2, a novel member of the VPS10 domain containing receptor family, prominently expressed in the developing mouse brain. Mech. Dev. 100: 335-338, 2001.
[1301] 52. Apte, S. S.; Mattei, M.-G.; Olsen, B. R.: Cloning of the cDNA encoding human tissue inhibitor of metalloproteinases-3 (TIMP-3) and mapping of the TIMP3 gene to chromosome 22. Genomics 19: 86-90, 1994.
[1302] 53. Ayyagari, R.; Griesinger, I. B.; Bingham, E.; Lark, K. K.; Moroi, S. E.; Sieving, P. A.: Autosomal dominant hemorrhagic macular dystrophy not associated with the TIMP3 gene. Arch. Ophthal. 118: 85-92, 2000.
[1303] 54. Carrero-Valenzuela, R. D.; Klein, M. L.; Weleber, R. G.; Murphey, W. H.; Litt, M.: Sorsby fundus dystrophy: a family with the ser181cys mutation of the tissue inhibitor of metalloproteinases 3. Arch. Ophthal. 114: 737-738, 1996.
[1304] 55. Felbor, U.; Stohr, H.; Amann, T.; Schonherr, U.; Weber, B. H. F.: A novel ser156cys mutation in the tissue inhibitor of metalloproteinase-3 (TIMP3) in Sorsby's fundus dystrophy with unusual clinical features. Hum. Molec. Genet. 4: 2415-2416, 1995.
[1305] 56. Felbor, U.; Suvanto, E. A.; Forsius, H. R.; Eriksson, A. W.; Weber, B. H. F.: Autosomal recessive Sorsby fundus dystrophy revisited: molecular evidence for dominant inheritance. Am. J. Hum. Genet. 60: 57-62, 1997.
[1306] 57. Forsius, H. R.; Eriksson, A. W.; Suvanto, E. A.; Alanko, H. I.: Pseudoinflammatory fundus dystrophy with autosomal recessive inheritance. Am. J. Ophthal. 94: 634-649, 1982.
[1307] 58. Langton, K. P.; Barker, M. D.; McKie, N.: Localization of the functional domains of human tissue inhibitor of metalloproteinases-3 and the effects of a Sorsby's fundus dystrophy mutation. J. Biol. Chem. 273: 16778-16781, 1998.
[1308] 59. Langton, K. P.; McKie, N.; Curtis, A.; Goodship, J. A.; Bond, P. M.; Barker, M. D.; Clarke, M.: A novel tissue inhibitor of metalloproteinases-3 mutation reveals a common molecular phenotype in Sorsby's fundus dystrophy. J. Biol. Chem. 275: 27027-27031, 2000.
[1309] 60. Osman, M.; Tortorella, M.; Londei, M.; Quaratino, S.: Expression of matrix metalloproteinases and tissue inhibitors of metalloproteinases define the migratory characteristics of human monocyte-derived dendritic cells. Immunology 105: 73-82, 2002.
[1310] 61. Stohr, H.; Roomp, K.; Felbor, U.; Weber, B. H. F.: Genomic organization of the human tissue inhibitor of metalloproteinases-3 (TIMP3). Genome Res. 5: 483-487, 1995.
[1311] 62. Weber, B. H. F.; Vogt, G.; Pruett, R. C.; Stohr, H.; Felbor, U.: Mutations in the tissue inhibitor metalloproteinases-3 (TIMP3) in patients with Sorsby's fundus dystrophy. Nature Genet. 8: 352-356, 1994.
[1312] 63. Wijesuriya, S. D.; Evans, K.; Jay, M. R.; Davison, C.; Weber, B. H. F.; Bird, A. C.; Bhattacharya, S. S.; Gregory, C. Y.: Sorsby's fundus dystrophy in the British Isles: demonstration of a striking founder effect by microsatellite-generated haplotypes. Genome Res. 6: 92-101, 1996.
[1313] 64. Wilde, C. G.; Hawkins, P. R.; Coleman, R. T.; Levine, W. B.; Delegeane, A. M.; Okamoto, P. M.; Ito, L. Y.; Scott, R. W.; Seilhamer, J. J.: Cloning and characterization of human tissue inhibitor of metalloproteinases-3. DNA Cell Biol. 13: 711-718, 1994.
[1314] 65. Hatamura, I.; Kanauchi, Y.; Takahara, M.; Fujiwara, M.; Muragaki, Y.; Ooshima, A.; Ogino, T.: A nonsense mutation in TRPS1 in a Japanese family with tricho-rhino-phalangeal syndrome type I. (Letter) Clin. Genet. 59: 366-367, 2001.
[1315] 66. Hilton, M. J.; Sawyer, J. M.; Gutierrez, L.; Hogart, A.; Kung, T. C.; Wells, D. E.: Analysis of novel and recurrent mutations responsible for the tricho-rhino-phalangeal syndromes. J. Hum. Genet. 47: 103-106, 2002.
[1316] 67. Hou, J.; Parrish, J.; Ludecke, H.-J.; Sapru, M.; Wang, Y.; Chen, W.; Hill, A.; Siegel-Bartelt, J.; Northrup, H.; Elder, F. F. B.; Chinault, C.; Horsthemke, B.; Wagner, M. J.; Wells, D. E.: A 4-megabase YAC contig that spans the Langer-Giedion syndrome region on human chromosome 8q24.1: use in refining the location of the trichorhinophalangeal syndrome and multiple exostoses genes (TRPS1 and EXT1). Genomics 29: 87-97, 1995.
[1317] 68. Kobayashi, H.; Hino, M.; Shimodahira, M.; Iwakura, T.; Ishihara, T.; Ikekubo, K.; Ogawa, Y.; Nakao, K.; Kurahachi, H.: Missense mutation of TRPS1 in a family of tricho-rhino-phalangeal syndrome type III. Am. J. Med. Genet. 107: 26-29, 2002.
[1318] 69. Ludecke, H.-J.; Schaper, J.; Meinecke, P.; Momeni, P.; Gross, S.; von Holtum, D.; Hirche, H.; Abramowicz, M. J.; Albrecht, B.; Apacik, C.; Christen, H.-J.; Claussen, U.; and 28 others: Genotypic and phenotypic spectrum in tricho-rhino-phalangeal syndrome types I and III. Am. J. Hum. Genet. 68: 81-91, 2001.
[1319] 70. Ludecke, H.-J.; Wagner, M. J.; Nardmann, J.; La Pillo, B.; Parrish, J. E.; Willems, P. J.; Haan, E. A.; Frydman, M.; Hamers, G. J. H.; Wells, D. E.; Horsthemke, B.: Molecular dissection of a contiguous gene syndrome: localization of the genes involved in the Langer-Giedion syndrome. Hum. Molec. Genet. 4: 31-36, 1995.
[1320] 71. Momeni, P.; Glockner, G.; Schmidt, O.; von Holtum, D.; Albrecht, B.; Gillessen-Kaesbach, G.; Hennekam, R.; Meinecke, P.; Zabel, B.; Rosenthal, A.; Horsthemke, B.; Ludecke, H.-J.: Mutations in a new gene, encoding a zinc-finger protein, cause tricho-rhino-phalangeal syndrome type I. Nature Genet. 24: 71-74, 2000.
[1321] 72. Nagase, T.; Ishikawa, K.; Miyajima, N.; Tanaka, A.; Kotani, H.; Nomura, N.; Ohara, O.: Prediction of the coding sequences of unidentified human genes. IX. The complete sequences of 100 new cDNA clones from brain which can code for large proteins in vitro. DNA Res. 5: 31-39, 1998.
[1322] 73. Nakamura, H.; Sudo, T.; Tsuiki, H.; Miyake, H.; Morisaki, T.; Sasaki, J.; Masuko, N.; Kochi, M.; Ushio, Y.; Saya, H.: Identification of a novel human homolog of the Drosophila dlg, P-dlg, specifically expressed in the gland tissues and interacting with p55. FEBS Lett. 433: 63-67, 1998.
[1323] 74. Cheng, J.; Scully, P.; Shew, J. Y.; Lee, W. H.; Vila, V.; Haas, M.: Homozygous deletion of the retinoblastoma gene in an acute lymphoblastic leukemia (T) cell line. Blood 75: 730-735, 1990.
[1324] 75. Lee, E. Y.; To, H.; Shew, J. Y.; Bookstein, R.; Scully, P.; Lee, W. H.: Inactivation of the retinoblastoma susceptibility gene in human breast cancers. Science 241: 218-221, 1988.
[1325] 76. Venter, D. J.; Bevan, K. L.; Ludwig, R. L.; Riley, T. E.; Jat, P. S.; Thomas, D. G.; Noble, M. D.: Retinoblastoma gene deletions in human glioblastomas. Oncogene 6: 445-448, 1991.
[1326] 77. Woitach, J. T.; Hong, R.; Keck, C. L.; Zimonjic, D. B.; Popescu, N. C.; Thorgeirsson, S. S.: Assignment of the Bog gene (RBBP9) to syntenic regions of mouse chromosome 2G1-H1 and human chromosome 20p11.2 by fluorescence in situ hybridization. Cytogenet. Cell Genet. 85: 252-253, 1999.
[1327] 78. Woitach, J. T.; Zhang, M.; Niu, C.-H.; Thorgeirsson, S. S.: A retinoblastoma-binding protein that affects cell-cycle control and confers transforming ability. Nature Genet. 19: 371-374, 1998.
[1328] 79. Yokota, J.; Akiyama, T.; Fung, Y.-K. T.; Benedict, W. F.; Namba, Y.; Hanaoka, M.; Wada, M.; Terasaki, T.; Shimosato, Y.; Sugimura, T.; Terada, M.: Altered expression of the retinoblastoma (RB) gene in small-cell carcinoma of the lung. Oncogene 3: 471-475, 1988.
[1329] 80. Sagara, N.; Toda, G.; Hirai, M.; Terada, M.; Katoh, M.: Molecular cloning, differential expression, and chromosomal localization of human frizzled-1, frizzled-2, and frizzled-7. Biochem. Biophys. Res. Commun. 252: 117-122, 1998.
[1330] 81. Tanaka, S.; Akiyoshi, T.; Mori, M.; Wands, J. R.; Sugimachi, K.: A novel frizzled gene identified in human esophageal carcinoma mediates APC/beta-catenin signals. Proc. Nat. Acad. Sci. 95: 10164-10169, 1998.
[1331] 82. Winklbauer, R.; Medina, A.; Swain, R. K.; Steinbeisser, H.: Frizzled-7 signalling controls tissue separation during Xenopus gastrulation. Nature 413: 856-860, 2001.
[1332] 83. Cossins, J.; Dudgeon, T. J.; Catlin, G.; Gearing, A J. H.; Clements, J. M.: Identification of MMP-18, a putative novel human matrix metalloproteinase. Biochem. Biophys. Res. Commun. 228: 494-498, 1996.
[1333] 84. Pendas, A. M.; Knauper, V.; Puente, X. S.; Llano, E.; Mattei, M.-G.; Apte, S.; Murphy, G.; Lopez-Otin, C.: Identification and characterization of a novel human matrix metalloproteinase with unique structural characteristics, chromosomal location, and tissue distribution. J. Biol. Chem. 272: 4281-4286, 1997.
[1334] 85. Prakash, S. K.; Van den Veyver, I. B.; Franco, B.; Volta, M.; Ballabio, A.; Zoghbi, H. Y.: Characterization of a novel chromo domain gene in Xp22.3 with homology to Drosophila msl-3. Genomics 59: 77-84, 1999.
[1335] 86. Dosanjh, M. K.; Collins, D. W.; Fan, W.; Lennon, G. G.; Albala, J. S.; Shen, Z.; Schild, D.: Isolation and characterization of RAD51C, a new human member of the RAD51 family of related genes. Nucleic Acids Res. 26: 1179-1184, 1998.
[1336] 87. Masson, J.-Y.; Stasiak, A. Z.; Stasiak, A.; Benson, F. E.; West, S. C.: Complex formation by the human RAD51C and XRCC3 recombination repair proteins. Proc. Nat. Acad. Sci. 98: 8440-8446, 2001.
[1337] 88. Abonia, J. P.; Abel, K. J.; Eddy, R. L.; Elliott, R. W.; Chapman, V. M.; Shows, T. B.; Gross, K. W.: Linkage of Agt and Actsk-1 to distal mouse chromosome 8 loci: a new conserved linkage. Mammalian Genome 4: 25-32, 1993.
[1338] 89. Akkari, P. A.; Eyre, H. J.; Wilton, S. D.; Callen, D. F.; Lane, S. A.; Meredith, C.; Kedes, L.; Laing, N. G.: Assignment of the human skeletal muscle alpha actin gene (ACTA1) to 1q42 by fluorescence in situ hybridisation. Cytogenet. Cell Genet. 65: 265-267, 1994.
[1339] 90. Alonso, S.; Montagutelli, X.; Simon-Chazottes, D.; Guenet, J.-L.; Buckingham, M.: Re-localization of Actsk-1 to mouse chromosome 8, a new region of homology with human chromosome 1. Mammalian Genome 4: 15-20, 1993.
[1340] 91. Czosnek, H.; Nudel, U.; Shani, M.; Barker, P. E.; Pravtcheva, D. D.; Ruddle, F. H.; Yaffe, D.: The genes coding for the muscle contractile proteins, myosin heavy chain, myosin light chain 2, and skeletal muscle actin are located on three different mouse chromosomes. EMBO J. 1: 1299-1305, 1982.
[1341] 92. Goebel, H. H.; Anderson, J. R.; Hubner, C.; Oexle, K.; Warlo, I.: Congenital myopathy with excess of thin myofilaments. Neuromuscular Disord. 7: 160-168, 1997.
[1342] 93. Gunning, P.; Ponte, P.; Kedes, L.; Eddy, R.; Shows, T.: Chromosomal location of the co-expressed human skeletal and cardiac actin genes. Proc. Nat. Acad. Sci. 81: 1813-1817, 1984.
[1343] 94. Hanauer, A.; Heilig, R.; Levin, M.; Moisan, J. P.; Grzeschik, K. H.; Mandel, J. L.: The actin gene family in man: assignment of the gene for skeletal muscle alpha-actin to chromosome 1, and presence of actin sequences on autosomes 2 and 3, and on the X and Y chromosomes. (Abstract) Cytogenet. Cell Genet. 37: 487-488, 1984.
[1344] 95. Ilkovski, B.; Cooper, S. T.; Nowak, K.; Ryan, M. M.; Yang, N.; Schnell, C.; Durling, H. J.; Roddick, L. G.; Wilkinson, I.; Kornberg, A. J.; Collins, K. J.; Wallace, G.; Gunning, P.; Hardeman, E. C.; Laing, N. G.; North, K. N.: Nemaline myopathy caused by mutations in the muscle alpha-skeletal-actin gene. Am. J. Hum. Genet. 68: 1333-1343, 2001.
[1345] 96. Lee, W. M.; Galbraith, R. M.: The extracellular actin-scavenger system and actin toxicity. New Eng. J. Med. 326: 1335-1341, 1992.
[1346] 97. Nowak, K. J.; Wattanasirichaigoon, D.; Goebel, H. H.; Wilce, M.; Pelin, K.; Donner, K.; Jacob, R. L.; Hubner, C.; Oexle, K.; Anderson, J. R.; Verity, C. M.; North, K. N.; and 13 others: Mutations in the skeletal muscle alpha-actin gene in patients with actin myopathy and nemaline myopathy. Nature Genet. 23: 208-212, 1999.
[1347] 98. Shows, T.; Eddy, R. L.; Haley, L.; Byers, M.; Henry, M.; Gunning, P.; Ponte, P.; Kedes, L.: The coexpressed genes for human alpha (ACTA) and cardiac actin (ACTC) are on chromosomes 1 and 15, respectively. (Abstract) Cytogenet. Cell Genet. 37: 583 only, 1984.
[1348] 99. Ueyama, H.; Inazawa, J.; Ariyama, T.; Nishino, H.; Ochiai, Y.; Ohkubo, I.; Miwa, T.: Reexamination of chromosomal loci of human muscle actin genes by fluorescence in situ hybridization. Jpn. J. Hum. Genet. 40: 145-148, 1995.
[1349] 100. Aronsson, F. C.; Magnusson, P.; Andersson, B.; Karsten, S. L.; Shibasaki, Y.; Lendon, C. L.; Goate, A. M.; Brookes, A. J.: The NIK protein kinase and C17orf1 genes: chromosomal mapping, gene structures and mutational screening in frontotemporal dementia and parkinsonism linked to chromosome 17. Hum. Genet. 103: 340-345, 1998.
[1350] 101. Yayoshi-Yamamoto, S.; Taniuchi, I.; Watanabe, T.: FRL, a novel formin-related protein, binds to Rac and regulates cell motility and survival of macrophages. Molec. Cell. Biol. 20: 6872-6881, 2000.
[1351] 102. Burwinkel, B.; Amat, L.; Gray, R. G. F.; Matsuo, N.; Muroya, K.; Narisawa, K.; Sokol, R. J.; Vilaseca, M. A.; Kilimann, M. W.: Variability of biochemical and clinical phenotype in X-linked liver glycogenosis with mutations in the phosphorylase kinase PHKA2 gene. Hum. Genet. 102: 423-429, 1998.
[1352] 103. Burwinkel, B.; Shin, Y. S.; Bakker, H. D.; Deutsch, J.; Lozano, M. J.: Maire, I.; Kilimann, M. W.: Mutation hotspots in the PHKA2 gene in X-linked liver glycogenosis due to phosphorylase kinase deficiency with atypical activity in blood cells (XLG2). Hum. Molec. Genet. 5: 653-658, 1996.
[1353] 104. Davidson, J. J.; Ozcelik, T.; Hamacher, C.; Willems, P. J.; Francke, U.; Kilimann, M. W.: cDNA cloning of a liver isoform of the phosphorylase kinase alpha subunit and mapping of the gene to Xp22.2-p22.1, the region of human X-linked liver glycogenosis. Proc. Nat. Acad. Sci. 89: 2096-2100, 1992.
[1354] 105. Davisson, M. T.: X-linked genetic homologies between mouse and man. Genomics 1: 213-227, 1987.
[1355] 106. Garibaldi, L. R.; Borrone, C.; De Martini, I.; Battistini, E.: Dextrothyroxine treatment of phosphorylase-kinase deficiency glycogenosis in four boys. Helv. Paediat. Acta 33: 435-444, 1978.
[1356] 107. Goji, K.; Morishita, Y.; Kodama, S.; Takahashi, T.; Matsuo, T.: Lymphocyte phosphorylase kinase activities in the sex-linked form of liver phosphorylase kinase deficiency. Europ. J. Pediat. 143: 179-182, 1985.
[1357] 108. Hendrickx, J.; Bosshard, N. U.; Willems, P.; Gitzelmann, R.: Clinical, biochemical and molecular findings in a patient with X-linked liver glycogenosis followed for 40 years. Europ. J. Pediat. 157: 919-923, 1998.
[1358] 109. Hendrickx, J.; Coucke, P.; Bossuyt, P.; Wauters, J.; Raeymaekers, P.; Marchau, F.; Smit, G. P. A.; Stolte, I.; Sardharwalla, I. B.; Berthelot, J.; Van den Bergh, I.; Berger, R.; Van Broeckhoven, C.; Baussan, C.; Wapenaar, M.; Fernandes, J.; Willems, P. J.: X-linked liver glycogenosis: localization and isolation of a candidate gene. Hum. Molec. Genet. 2: 583-589, 1993.
[1359] 110. Hendrickx, J.; Coucke, P.; Dams, E.; Lee, P.; Odievre, M.; Corbeel, L.; Fernandes, J. F.; Willems, P. J.: Mutations in the phosphorylase kinase gene PHKA2 are responsible for X-linked liver glycogen storage disease. Hum. Molec. Genet. 4: 77-83, 1995.
[1360] 111. Hendrickx, J.; Coucke, P.; Hors-Cayla, M.-C.; Smit, G. P. A.; Shin, Y. S.; Deutsch, J.; Smeitink, J.; Berger, R.; Lee, P.; Fernandes, J.; Willems, P. J.: Localization of a new type of X-linked liver glycogenosis to the chromosomal region Xp22 containing the liver alpha-subunit of phosphorylase kinase (PHKA2). Genomics 21: 620-625, 1994.
[1361] 112. Hendrickx, J.; Coucke, P.; Raeymaekers, P.; Willems, P. J.: X-linked liver glycogenosis: localization and isolation of a strong candidate gene. (Abstract) Am. J. Hum. Genet. 51 (suppl.): A190 only, 1992.
[1362] 113. Hendrickx, J.; Dams, E.; Coucke, P.; Lee, P.; Fernandes, J.; Willems, P. J.: X-linked liver glycogenosis type II (XLG II) is caused by mutations in PHKA2, the gene encoding the liver alpha subunit of phosphorylase kinase. Hum. Molec. Genet. 5: 649-652, 1996.
[1363] 114. Hendrickx, J.; Lee, P.; Keating, J. P.; Carton, D.; Sardharwalla, I. B.; Tuchman, M.; Baussan, C.; Willems, P. J.: Complete genomic structure and mutational spectrum of PHKA2 in patients with X-linked liver glycogenosis type I and II. Am. J. Hum. Genet. 64: 1541-1549, 1999.
[1364] 115. Hers, H.-G.; Van Hoof, F.; de Barsy, T.: Glycogen storage diseases. In: Scriver, C. R.; Beaudet, A. L.; Sly, W. S.; Valle, D.: The Metabolic Basis of Inherited Disease. New York: McGraw-Hill (pub.) (6th ed.) I: 1989. Pp. 425-452.
[1365] 116. Hers, H. G.: Etudes enzymatiques sur fragments hepatiques: application a la classification des glycogenoses. Rev. Int. Hepat. 9: 35-55, 1959.
[1366] 117. Hug, G.: Personal Communication. Cincinnati, Ohio 1974.
[1367] 118. Hug, G.; Schubert, W. K.; Chuck, G.: Deficient activity of dephosphophosphorylase kinase and accumulation of glycogen in the liver. J. Clin. Invest. 48: 704-715, 1969.
[1368] 119. Huijing, F.: Phosphorylase kinase deficiency. Biochem. Genet. 4: 187-194, 1970.
[1369] 120. Huijing, F.: Phosphorylase kinase in leucocytes of normal subjects and of patients with glycogen-storage disease. Biochim. Biophys. Acta 148: 601-603, 1967.
[1370] 121. Huijing, F.: Glycogen-storage disease type VIa: low phosphorylase kinase activity caused by a low enzyme-substrate affinity. Biochim. Biophys. Acta 206: 199-201, 1970.
[1371] 122. Huijing, F.; Fernandez, J.: Liver glycogenosis and phosphorylase kinase deficiency. (Letter) Am. J. Hum. Genet. 22: 484-485, 1970.
[1372] 123. Huijing, F.; Fernandez, J.: X-chromosomal inheritance of liver glycogenosis with phosphorylase kinase deficiency. Am. J. Hum. Genet. 21: 275-284, 1969.
[1373] 124. Keating, J. P.; Brown, B. I.; White, N. H.; DiMauro, S.: X-linked glycogen storage disease: a cause of hypotonia, hyperuricemia, and growth retardation. Am. J. Dis. Child. 139: 609-613, 1985.
[1374] 125. Kilimann, M. W.; Zander, N. F.; Kuhn, C. C.; Crabb, J. W.; Meyer, H. E.; Heilmeyer, L. M. G., Jr.: The alpha and beta subunits of phosphorylase kinase are homologous: cDNA cloning and primary structure of the beta subunit. Proc. Nat. Acad. Sci. 85: 9381-9385, 1988.
[1375] 126. Krebs, E. G.; Love, D. S.; Bratvold, G. E.; Trayser, K. A.; Meyer, W. L.; Fischer, E. H.: Purification and properties of rabbit skeletal muscle phosphorylase B kinase. Biochemistry 3: 1022-1033, 1964.
[1376] 127. Kumatori, A.; Faizunnessa, N. N.; Suzuki, S.; Moriuchi, T.; Kurozumi, H.; Nakamura, M.: Nonhomologous recombination between the cytochrome b-558 heavy chain gene (CYBB) and LINE-1 causes an X-linked chronic granulomatous disease. Genomics 53: 123-128, 1998.
[1377] 128. Lyon, J. B., Jr.; Porter, J.; Robertson, M.: Phosphorylase B kinase inheritance in mice. Science 155: 1550-1551, 1967.
[1378] 129. Malthus, R.; Clark, D. G.; Watts, C.; Sneyd, J. G. T.: Glycogen-storage disease in rats, a genetically determined deficiency of liver phosphorylase kinase. Biochem. J. 188: 99-106, 1980.
[1379] 130. McAdams, A. J.; Hug, G.; Bove, K. E.: Glycogen storage disease, type I to X: criteria for morphologic diagnosis. Hum. Path. 5: 463-487, 1974.
[1380] 131. Migeon, B. R.; Huijing, F.: Glycogen-storage disease associated with phosphorylase kinase deficiency: evidence for X inactivation. Am. J. Hum. Genet. 26: 360-368, 1974.
[1381] 132. Nagai, T.; Matsuo, N.; Tsuchiya, Y.; Cho, H.; Hasegawa, Y.; Igarashi, Y.: Proximal renal tubular acidosis associated with glycogen storage disease, type 9. Acta Paediat. Scand. 77: 460-463, 1988.
[1382] 133. Ryder-Cook, A. S.; Derry, J. M. J.; Barnard, P. J.: Localization of the phosphorylase kinase alpha subunit gene on the mouse X chromosome. (Abstract) Cytogenet. Cell Genet. 51: 1071-1072, 1989.
[1383] 134. Schimke, R. N.; Zakheim, R. M.; Corder, R. C.; Hug, G.: Glycogen storage disease type IX: benign glycogenosis of liver and hepatic phosphorylase kinase deficiency. J. Pediat. 83: 1031-1034, 1973.
[1384] 135. Schneider, A.; Davidson, J. J.; Wullrich, A.; Kilimann, M. W.: Phosphorylase kinase deficiency in I-strain mice is associated with a frameshift mutation in the alpha-subunit muscle isoform. Nature Genet. 5: 381-385, 1993.
[1385] 136. van den Berg, I. E. T.; van Beurden, E. A. C. M.; Malingre, H. E. M.; Ploos van Amstel, H. K.; Poll-The, B. T.; Smeitink, J. A. M.; Lamers, W. H.; Berger, R.: X-linked liver phosphorylase kinase deficiency is associated with mutations in the human liver phosphorylase kinase alpha subunit. Am. J. Hum. Genet. 56: 381-387, 1995.
[1386] 137. Varsanyi, M.; Vrbica, A.; Heilmeyer, L. M. G., Jr.: X-linked dominant inheritance of partial phosphorylase kinase deficiency in mice. Biochem. Genet. 18: 247-261, 1980.
[1387] 138. Wallis, P. G.; Sidbury, J. B., Jr.; Harris, R. C.: Hepatic phosphorylase defect. Studies on peripheral blood. Am. J. Dis. Child. 111: 278-282, 1966.
[1388] 139. Wauters, J. G.; Bossuyt, P. J.; Davidson, J.; Hendrickx, J.; Kilimann, M. W.; Willems, P. J.: Regional mapping of a liver alpha-subunit gene of phosphorylase kinase (PHKA) to the distal region of human chromosome Xp. Cytogenet. Cell Genet. 60: 194-196, 1992.
[1389] 140. Willems, P. J.; Gerver, W. J. M.; Berger, R.; Fernandes, J.: The natural history of liver glycogenosis due to phosphorylase kinase deficiency: a longitudinal study of 41 patients. Europ. J. Pediat. 149: 268-271, 1990.
[1390] 141. Willems, P. J.; Hendrickx, J.; Van der Auwera, B. J.; Vits, L.; Raeymaekers, P.; Coucke, P. J.; Van den Bergh, I.; Berger, R.; Smit, G. P. A.; Van Broeckhoven, C.; Kilimann, M. W.; Van Elsen, A. F.; Fernandes, J. F.: Mapping of the gene for X-linked liver glycogenosis due to phosphorylase kinase deficiency to human chromosome region Xp22. Genomics 9: 565-569, 1991.
[1391] 142. Williams, H. E.; Field, J. B.: Low leukocyte phosphorylase in hepatic phosphorylase deficient glycogen storage disease. J. Clin. Invest. 40: 1841-1845, 1961.
[1392] 143. Zander, N. F.; Meyer, H. E.; Hoffmann-Posorske, E.; Crabb, J. W.; Heilmeyer, L. M. G., Jr.; Kilimann, M. W.: cDNA cloning and complete primary structure of skeletal muscle phosphorylase kinase (alpha subunit). Proc. Nat. Acad. Sci. 85: 2929-2933, 1988.
[1393] 144. Andre, E.; Becker-Andre, M.: Expression of an N-terminally truncated form of human focal adhesion kinase in brain. Biochem. Biophys. Res. Commun. 190: 140-147, 1993.
[1394] 145. Fiedorek, F. T., Jr.; Kay, E. S.: Mapping of the focal adhesion kinase (Fadk) gene to mouse chromosome 15 and human chromosome 8. Mammalian Genome 6: 123-126, 1995.
[1395] 146. Polte, T. R.; Hanks, S. K.: Interaction between focal adhesion kinase and Crk-associated tyrosine kinase substrate p130-Cas. Proc. Nat. Acad. Sci. 92: 10678-10682, 1995.
[1396] 147. Schaller, M. D.; Borgman, C.; Cobb, B. S.; Vines, R. R.; Reynolds, A. B.; Parsons, J. T.: pp 125(FAK), a structurally distinctive protein-tyrosine kinase associated with focal adhesions. Proc. Nat. Acad. Sci. 89: 5192-5196, 1992.
[1397] 148. Aronsson, F. C.; Magnusson, P.; Andersson, B.; Karsten, S. L.; Shibasaki, Y.; Lendon, C. L.; Goate, A. M.; Brookes, A. J: The NIK protein kinase and C17orf1 genes: chromosomal mapping, gene structures and mutational screening in frontotemporal dementia and parkinsonism linked to chromosome 17. Hum. Genet. 103: 340-345, 1998.
[1398] 149. Claudio, E.; Brown, K.; Park, S.; Wang, H.; Siebenlist, U.: BAFF-induced NEMO-independent processing of NF-kappa-B2 in maturing B cells. Nature Immun. 3: 958-965, 2002.
[1399] 150. Malinin, N. L.; Boldin, M. P.; Kovalenko, A. V.; Wallach, D.: MAP3K-related kinase involved in NF-kappaB induction by TNF, CD95 and IL-1. Nature 385: 540-544, 1997.
[1400] 151. Matsushima, A.; Kaisho, T.; Rennert, P. D.; Nakano, H.; Kurosawa, K.; Uchida, D.; Takeda, K.; Akira, S.; Matsumoto, M.: Essential role of nuclear factor (NF)-kappa-B-inducing kinase and inhibitor of kappa-B (1-kappa-B) kinase alpha in NF-kappa-B activation through lymphotoxin beta receptor, but not through tumor necrosis factor receptor I. J. Exp. Med. 193: 631-636, 2001.
[1401] 152. Shinkura, R.; Kitada, K.; Matsuda, F.; Tashiro, K.; Ikuta, K.; Suzuki, M.; Kogishi, K.; Serikawa, T.; Honjo, T.: Alymphoplasia is caused by a point mutation in the mouse gene encoding Nf-kappa-b-inducing kinase. Nature Genet. 22: 74-77, 1999.
[1402] 153. Smith, C.; Andreakos, E.; Crawley, J. B.; Brennan, F. M.; Feldmann, M.; Foxwell, B. M. J.: NF-kappa-B-inducing kinase is dispensable for activation of NF-kappa-B in inflammatory settings but essential for lymphotoxin beta receptor activation of NF-kappa-B in primary human fibroblasts. J. Immun. 167: 5895-5903, 2001.
[1403] 154. Yin, L.; Wu, L.; Wesche, H.; Arthur, C. D.; White, J. M.; Goeddel, D. V.; Schreiber, R. D.: Defective lymphotoxin-beta receptor-induced NF-kappa-B transcriptional activity in NIK-deficient mice. Science 291: 2162-2165, 2001.
[1404] 155. Halleck, M. S.; Lawler, J. F., Jr.; Blackshaw, S.; Gao, L.; Nagarajan, P.; Hacker, C.; Pyle, S.; Newman, J. T.; Nakanishi, Y.; Ando, H.; Weinstock, D.; Williamson, P.; Schlegel, R. A.: Differential expression of putative transbilayer amphipath transporters. Physiol. Genomics 1: 139-150, 1999.
[1405] 156. Kikuno, R.; Nagase, T.; Ishikawa, K.; Hirosawa, M.; Miyajima, N.; Tanaka, A.; Kotani, H.; Nomura, N.; Ohara, O.: Prediction of the coding sequences of unidentified human genes. XIV. The complete sequences of 100 new cDNA clones from brain which code for large proteins in vitro. DNA Res. 6: 197-205, 1999.
[1406] 157. Gibson, L.; Holmgreen, S. P.; Huang, D. C. S.; Bernard, O.; Copeland, N. G.; Jenkins, N. A.; Sutherland, G. R.; Baker, E.; Adams, J. M.; Cory, S.: bcl-w, a novel member of the bcl-2 family, promotes cell survival. Oncogene 13: 665-675, 1996.
[1407] 158. Ross, A. J.; Waymire, K. G.; Moss, J. E.; Parlow, A. F.; Skinner, M. K.; Russell, L. D.; MacGregor, G. R.: Testicular degeneration in Bclw-deficient mice. Nature Genet. 18: 251-256, 1998.
[1408] 159. Anguita, J.; Chalfant, M. L.; Civan, M. M.; Coca-Prados, M.: Molecular cloning of the human volume-sensitive chloride conductance regulatory protein, pI(Cln), from ocular ciliary epithelium. Biochem. Biophys. Res. Commun. 208: 89-95, 1995.
[1409] 160. Buyse, G.; De Greef, C.; Raeymaekers, L.; Droogmans, G.; Nilius, B.; Eggermont, J.: The ubiquitously expressed pI(Cln) protein forms homomeric complexes in vitro. Biochem. Biophys. Res. Commun. 218: 822-827, 1996.
[1410] 161. Nagl, U. O.; Erdel, M.; Schmarda, A.; Seri, M.; Pinggera, G. M.; Gschwentner, M.; Duba, C.; Galietta, L. J. V.; Deetjen, P.; Utermann, G.; Paulmichl, M.: Chromosomal localization of the genes (CLNS1A and CLNS1B) coding for the swelling-dependent chloride channel I(Cln). Genomics 38: 438-441, 1996.
[1411] 162. Schwartz, R. S.; Rybicki, A. C.; Nagel, R. L.: Molecular cloning and expression of a chloride channel-associated protein pI(Cln) in human young red blood cells: association with actin. Biochem. J. 327: 609-616, 1997.
[1412] 163. Abbs, S.; Roberts, R. G.; Mathew, C. G.; Bentley, D. R.; Bobrow, M.: Accurate assessment of intragenic recombination frequency within the Duchenne muscular dystrophy gene. Genomics 7: 602-606, 1990.
[1413] 164. Ahn, A. H.; Kunkel, L. M.: The structural and functional diversity of dystrophin. Nature Genet. 3: 283-291, 1993.
[1414] 165. Alwine, J. C.; Kemp, D. J.; Stark, G. R.: Method for detection of specific RNAs in agarose gels by transfer to diazobenzyloxymethyl-paper and by hybridization with DNA probes. Proc. Nat. Acad. Sci. 74: 5350-5354, 1977.
[1415] 166. Angelini, C.; Beggs, A. H.; Hoffman, E. P.; Fanin, M.; Kunkel, L. M.: Enormous dystrophin in a patient with Becker muscular dystrophy. Neurology 40: 808-812, 1990.
[1416] 167. Badorff, C.; Berkely, N.; Mehrotra, S.; Talhouk, J. W.; Rhoads, R. E.; Knowlton, K. U.: Enteroviral protease 2A directly cleaves dystrophin and is inhibited by a dystrophin-based substrate analogue. J. Biol. Chem. 275: 11191-11197, 2000.
[1417] 168. Badorff, C.; Lee, G.-H.; Lamphear, B. J.; Martone, M. E.; Campbell, K. P.; Rhoads, R. E.; Knowlton, K. U.: Enteroviral protease 2A cleaves dystrophin—evidence of cytoskeletal disruption in an acquired cardiomyopathy. Nature Med. 5: 320-326, 1999.
[1418] 169. Bakker, E.; Hofker, M. H.; Goor, N.; Mandel, J. L.; Wrogemann, K.; Davies, K. E.; Kunkel, L. M.; Willard, H. F.; Fenton, W. A.; Sandkuyl, L.; Majoor-Krakauer, D.; van Essen, A. J.; Jahoda, M. G. J.; Sachs, E. S.; van Ommen, G. J. B.; Pearson, P. L.: Prenatal diagnosis and carrier detection of Duchenne muscular dystrophy with closely linked RFLPs. Lancet I: 655-658, 1985.
[1419] 170. Bakker, E.; Pearson, P. L.: Mutation of the Duchenne muscular dystrophy gene associated with meiotic recombination. (Letter) Clin. Genet. 30: 347-349, 1986.
[1420] 171. Bakker, E.; Van Broeckhoven, C.; Bonten, E. J.; van de Vooren, M. J.; Veenema, H.; Van Hul, W.; Van Ommen, G. J. B.; Vandenberghe, A.; Pearson, P. L.: Germline mosaicism and Duchenne muscular dystrophy mutations. Nature 329: 554-556, 1987.
[1421] 172. Bar, S.; Barnea, E.; Levy, Z.; Neuman, S.; Yaffe, D.; Nudel, U.: A novel product of the Duchenne muscular dystrophy gene which greatly differs from the known isoforms in its structure and tissue distribution. Biochem. J. 272: 557-560, 1990.
[1422] 173. Barbieri, A. M.; Soriani, N.; Tubiello, G. M.; Ferrari, M.; Carrera, P.: A nonsense mutation (gln-673-term) in exon 17 of the human dystrophin gene detected by heteroduplex analysis. Hum. Genet. 96: 343-344, 1995.
[1423] 174. Bartlett, R. J.; Pericak-Vance, M. A.; Koh, J.; Yamaoka, L. H.; Chen, J. C.; Hung, W.-Y.; Speer, M. C.; Wapenaar, M. C.; Van Ommen, G. J. B.; Bakker, E.; Pearson, P. L.; Kandt, R. S.; Siddique, T.; Gilbert, J. R.; Lee, J. E.; Sirotkin-Roses, M. J.; Roses, A. D.: Duchenne muscular dystrophy: high frequency of deletions. Neurology 38: 1-4, 1988.
[1424] 175. Barton-Davis, E. R.; Cordier, L.; Shoturma, D. I.; Leland, S. E.; Sweeney, H. L.: Aminoglycoside antibiotics restore dystrophin function to skeletal muscles of mdx mice. J. Clin. Invest. 104: 375-381, 1999.
[1425] 176. Bastianutto, C.; Bestard, J. A.; Lahnakoski, K.; Broere, D.; De Visser, M.; Zaccolo, M.; Pozzan, T.; Ferlini, A.; Muntoni, F.; Patarnello, T.; Klamut, H. J.: Dystrophin muscle enhancer 1 is implicated in the activation of non-muscle isoforms in the skeletal muscle of patients with X-linked dilated cardiomyopathy. Hum. Molec. Genet. 10: 2627-2635, 2001.
[1426] 177. Baumbach, L. L.; Chamberlain, J. S.; Ward, P. A.; Farwell, N. J.; Caskey, C. T.: Molecular and clinical correlation of deletion leading to Duchenne and Becker muscular dystrophies. Neurology 39: 465-474, 1989.
[1427] 178. Baumbach, L. L.; Ward, P. A.; Fenwick, R.; Caskey, C. T.: Analysis of mutations at the Duchenne muscular dystrophy locus provides no evidence for illegitimate recombination in deletion formation. (Abstract) Am. J. Hum. Genet. 45 (suppl.): A173, 1989.
[1428] 179. Becker, P. E.: Eine neue X-chromosomale Muskeldystrophie. Acta Psychiat. Neurol. Scand. 193: 427, 1955.
[1429] 180. Becker, P. E.: Two new families of benign sex-linked recessive muscular dystrophy. Rev. Canad. Biol. 21: 551-566, 1962.
[1430] 181. Becker, P. E.: Neue Ergebnisse der Genetik der Muskeldystrophien. Acta Genet. Statist. Med. 7: 303-310, 1957.
[1431] 182. Beggs, A. H.; Koenig, M.; Boyce, F. M.; Kunkel, L. M.: Detection of 98% of DMD/BMD gene deletions by polymerase chain reaction. Hum. Genet. 86: 45-48, 1990.
[1432] 183. Berko, B. A.; Swift, M.: X-linked dilated cardiomyopathy. New Eng. J. Med. 316: 1186-1191, 1987.
[1433] 184. Bettecken, T.; Muller, C. R.: Identification of a 220-kb insertion into the Duchenne gene in a family with an atypical course of muscular dystrophy. Genomics 4: 592-596, 1989.
[1434] 185. Bies, R. D.: X-linked dilated cardiomyopathy. (Letter) New Eng. J. Med. 330: 368-369, 1994.
[1435] 186. Bies, R. D.; Caskey, C. T.; Fenwick, R.: An intact cysteine-rich domain is required for dystrophin function. J. Clin. Invest. 90: 666-672, 1992.
[1436] 187. Bittner, R. E.; Streubel, B.; Shorny, S.; Schaden, G.; Voit, T.; Hoger, H.: Coisogenic all-plus-one immunization: a model for identifying missing proteins in null-mutant conditions. Antibodies to dystrophin in mdx mouse after transplantation of muscle from normal coisogenic donor. Neuropediatrics 25: 176-182, 1994.
[1437] 188. Blake, D. J.; Love, D. R.; Tinsley, J.; Morris, G. E.; Turley, H.; Gatter, K.; Dickson, G.; Edwards, Y. H.; Davies, K. E.: Characterization of a 4.8 kb transcript from the Duchenne muscular dystrophy locus expressed in schwannoma cells. Hum. Molec. Genet. 1: 103-109, 1992.
[1438] 189. Bodrug, S. E.; Ray, P. N.; Gonzalez, I. L.; Schmickel, R. D.; Sylvester, J. E.; Worton, R. G.: Molecular analysis of a constitutional X-autosome translocation in a female with muscular dystrophy. Science 237: 1620-1624, 1987.
[1439] 190. Boyce, F. M.; Beggs, A. H.; Feener, C.; Kunkel, L. M.: Dystrophin is transcribed in brain from a distant upstream promoter. Proc. Nat. Acad. Sci. 88: 1276-1280, 1991.
[1440] 191. Boyd, Y.; Buckle, V. J.: Cytogenetic heterogeneity of translocations associated with Duchenne muscular dystrophy. Clin. Genet. 29: 108-115, 1986.
[1441] 192. Bulman, D. E.; Gangopadhyay, S. B.; Bebchuck, K. G.; Worton, R. G.; Ray, P. N.: Point mutation in the human dystrophin gene: identification through Western blot analysis. Genomics 10: 457-460, 1991.
[1442] 193. Burke, J. F.; Mogg, A. E.: Suppression of a nonsense mutation in mammalian cells in vivo by the aminoglycoside antibiotics G-418 and paromomycin. Nucleic Acids Res. 13: 6265-6272, 1985.
[1443] 194. Burnette, W. N.: ‘Western blotting’: electrophoretic transfer of proteins from sodium dodecyl sulfate-polyacrylamide gels to unmodified nitrocellulose and radiographic detection with antibody and radioiodinated protein A. Anal. Biochem. 112: 195-203, 1981.
[1444] 195. Bushby, K. M. D.; Cleghorn, N. J.; Curtis, A.; Haggerty, I. D.; Nicholson, L. V. B.; Johnson, M. A.; Harris, J. B.; Bhattacharya, S. S.: Identification of a mutation in the promoter region of the dystrophin gene in a patient with atypical Becker muscular dystrophy. Hum. Genet. 88: 195-199, 1991.
[1445] 196. Chamberlain, J. S.; Pearlman, J. A.; Muzny, D. M.; Gibbs, R. A.; Ranier, J. E.; Reeves, A. A.; Caskey, C. T.: Expression of the murine Duchenne muscular dystrophy gene in muscle and brain. Science 239: 1416-1418, 1988.
[1446] 197. Chelly, J.; Concordet, J.-P.; Kaplan, J.-C.; Kahn, A.: Illegitimate transcription: transcription of any gene in any cell type. Proc. Nat. Acad. Sci. 86: 2617-2621, 1989.
[1447] 198. Chelly, J.; Gilgenkrantz, H.; Hugnot, J. P.; Hamard, G.; Lambert, M.; Recan, D.; Akli, S.; Cometto, M.; Kahn, A.; Kaplan, J. C.: Illegitimate transcription: application to the analysis of truncated transcripts of the dystrophin gene in nonmuscle cultured cells from Duchenne and Becker patients. J. Clin. Invest. 88: 1161-1166, 1991.
[1448] 199. Chelly, J.; Hamard, G.; Koulakoff, A.; Kaplan, J.-C.; Kahn, A.; Berwald-Netter, Y.: Dystrophin gene transcribed from different promoters in neuronal and glial cells. Nature 344: 64-65, 1990.
[1449] 200. Chelly, J.; Kaplan, J.-C.; Maire, P.; Gautron, S.; Kahn, A.: Transcription of the dystrophin gene in human muscle and non-muscle tissues. Nature 333: 858-860, 1988.
[1450] 201. Clemens, P. R.; Ward, P. A.; Caskey, C. T.; Bulman, D. E.; Fenwick, R. G.: Premature chain termination mutation causing Duchenne muscular dystrophy. Neurology 42: 1775-1782, 1992.
[1451] 202. Comi, G. P.; Ciafaloni, E.; de Silva, H. A. R.; Prelle, A.; Bardoni, A.; Rigoletto, C.; Robotti, M.; Bresolin, N.; Moggio, M.; Fortunato, F.; Ciscato, P.; Turconi, A.; Rose, A. D.; Scarlato, G.: A G(+1)-to-A transversion at the 5-prime splice site of intron 69 of the dystrophin gene causing the absence of peripheral nerve Dp116 and severe clinical involvement in a DMD patient. Hum. Molec. Genet. 4: 2171-2174, 1995.
[1452] 203. Cooper, B. J.; Valentine, B. A.; Wilson, S.; Patterson, D. F.; Concannon, P. W.: Canine muscular dystrophy: confirmation of X-linked inheritance. J. Hered. 79: 405-408, 1988.
[1453] 204. Covone, A. E.; Lerone, M.; Romeo, G.: Genotype-phenotype correlation and germline mosaicism in DMD/BMD patients with deletions of the dystrophin gene. Hum. Genet. 87: 353-360, 1991.
[1454] 205. Cox, G. A.; Cole, N. M.; Matsumura, K.; Phelps, S. F.; Hauschka, S. D.; Campbell, K. P.; Faulkner, J. A.; Chamberlain, J. S.: Overexpression of dystrophin in transgenic mdx mice eliminates dystrophic symptoms without toxicity. Nature 364: 725-729, 1993.
[1455] 206. Cox, G. A.; Sunada, Y.; Campbell, K. P.; Chamberlain, J. S.: Dp71 can restore the dystrophin-associated glycoprotein complex in muscle but fails to prevent dystrophy. Nature Genet. 8: 333-339, 1994.
[1456] 207. Crawford, G. E.; Lu, Q. L.; Partridge, T. A.; Chamberlain, J. S.: Suppression of revertant fibers in mdx mice by expression of a functional dystrophin Hum. Molec. Genet. 10: 2745-2750, 2001.
[1457] 208. Darras, B. T.; Blattner, P.; Harper, J. F.; Spiro, A. J.; Alter, S.; Francke, U.: Intragenic deletions in 21 Duchenne muscular dystrophy (DMD)/Becker muscular dystrophy (BMD) families studied with the dystrophin cDNA: location of breakpoints on HindIII and BglII exon-containing fragment maps, meiotic and mitotic origin of the mutations. Am. J. Hum. Genet. 43: 620-629, 1988.
[1458] 209. Darras, B. T.; Francke, U.: Normal human genomic restriction-fragment patterns and polymorphisms revealed by hybridization with the entire dystrophin cDNA. Am. J. Hum. Genet. 43: 612-619, 1988.
[1459] 210. Darras, B. T.; Francke, U.: A partial deletion of the muscular dystrophy gene transmitted twice by an unaffected male. Nature 329: 556-558, 1987.
[1460] 211. Davies, K. E.; Smith, T. J.; Bundey, S.; Read, A. P.; Flint, T.; Bell, M.; Speer, A.: Mild and severe muscular dystrophy associated with deletions in Xp21 of the human X chromosome. J. Med. Genet. 25: 9-13, 1988.
[1461] 212. De Angelis, F. G.; Sthandier, O.; Berarducci, B.; Toso, S.; Galluzzi, G.; Ricci, E.; Cossu, G.; Bozzoni, I.: Chimeric snRNA molecules carrying antisense sequences against the splice junctions of exon 51 of the dystrophin pre-mRNA induce exon skipping and restoration of a dystrophin synthesis in delta-48-50 DMD cells. Proc Nat. Acad. Sci. 99: 9456-9461, 2002.
[1462] 213. den Dunnen, J. T.; Bakker, E.; Klein Breteler, E. G.; Pearson, P. L.; van Ommen, G. J. B.: Direct mutation of more than 50% of the Duchenne muscular dystrophy mutations by field inversion gels. Nature 329: 640-642, 1987.
[1463] 214. den Dunnen, J. T.; Grootscholten, P. M.; Bakker, E.; Blonden, L. A. J.; Ginjaar, H. B.; Wapenaar, M. C.; van Paassen, H. M. B.; van Broeckhoven, C.; Pearson, P. L.; van Ommen, G. J. B.: Topography of the Duchenne muscular dystrophy (DMD) gene: FIGE and cDNA analysis of 194 cases reveals 115 deletions and 13 duplications. Am. J. Hum. Genet. 45: 835-847, 1989.
[1464] 215. Dickson, G.; Pizzey, J. A.; Elsom, V. E.; Love, D.; Davies, K. E.; Walsh, F. S.: Distinct dystrophin mRNA species are expressed in embryonic and adult mouse skeletal muscle. FEBS Lett. 242: 47-52, 1988.
[1465] 216. Dominguez-Steglich, M.; Meng, G.; Bettecken, T.; Muller, C. R.; Schmid, M.: The dystrophin gene is autosomally located on a microchromosome in chicken. Genomics 8: 536-540, 1990.
[1466] 217. Doolittle, R. F.: Similar amino acid sequences: chance or common ancestry? Science 214: 149-159, 1981.
[1467] 218. Doriguzzi, C.; Palmucci, L.; Mongini, T.; Chiado-Piat, L.; Restagno, G.; Ferrone, M.: Exercise intolerance and recurrent myoglobinuria as the only expression of Xp21 Becker type muscular dystrophy. J. Neurol. 240: 269-271, 1993.
[1468] 219. Dubrovsky, A. L.; Taratuto, A. L.; Sevlever, G.; Schultz, M.; Pegoraro, E.; Hoop, R. C.; Hoffman, E. P.: Duchenne muscular dystrophy and myotonic dystrophy in the same patient. Am. J. Med. Genet. 55: 342-348, 1995.
[1469] 220. Emery, A. E. H.: Duchenne Muscular Dystrophy. Oxford, UK: Oxford University Press (pub.) (2nd ed.): 1993.
[1470] 221. England, S. B.; Nicholson, L. V. B.; Johnson, M. A.; Forrest, S. M.; Love, D. R.; Zubrzycka-Gaarn, E. E.; Bulman, D. E.; Harris, J. B.; Davies, K. E.: Very mild muscular dystrophy associated with the deletion of 46% dystrophin. Nature 343: 180-182, 1990.
[1471] 222. Fabb, S. A.; Wells, D. J.; Serpente, P.; Dickson, G.: Adeno-associated virus vector gene transfer and sarcolemmal expression of a 144 kDa micro-dystrophin effectively restores the dystrophin-associated protein complex and inhibits myofibre degeneration in nude/mdx mice. Hum. Molec. Genet. 11: 733-741, 2002.
[1472] 223. Feener, C. A.; Boyce, F. M.; Kunkel, L. M.: Rapid detection of CA polymorphisms in cloned DNA: application to the 5-prime region of the dystrophin gene. Am. J. Hum. Genet. 48: 621-627, 1991.
[1473] 224. Ferlini, A.; Galie, N.; Merlini, L.; Sewry, C.; Branzi, A.; Muntoni, F.: A novel Alu-like element rearranged in the dystrophin gene causes a splicing mutation in a family with X-linked dilated cardiomyopathy. Am. J. Hum. Genet. 63: 436-446, 1998.
[1474] 225. Finnegan, D. J.: Eukaryotic transposable elements and genome evolution. Trends Genet. 5: 103-107, 1989.
[1475] 226. Forrest, S. M.; Cross, G. S.; Speer, A.; Gardner-Medwin, D.; Burn, J.; Davies, K. E.: Preferential deletion of exons in Duchenne and Becker muscular dystrophies. Nature 329: 638-640, 1987.
[1476] 227. Francke, U.; Ochs, H. D.; de Martinville, B.; Giacalone, J.; Lindgren, V.; Disteche, C.; Pagon, R. A.; Hofker, M. H.; van Ommen, G.-J. B.; Pearson, P. L.; Wedgwood, R. J.: Minor Xp21 chromosome deletion in a male associated with expression of Duchenne muscular dystrophy, chronic granulomatous disease, retinitis pigmentosa, and McLeod syndrome. Am. J. Hum. Genet. 37: 250-267, 1985.
[1477] 228. Furst, D.; Nave, R.; Osborn, M.; Weber, K.; Bardosi, A.; Archidiacono, N.; Ferro, M.; Romano, V.; Romeo, G.: Nebulin and titin expression in Duchenne muscular dystrophy appears normal. FEBS Lett. 224: 49-53, 1987.
[1478] 229. Giacalone, J. P.; Francke, U.: Common sequence motifs at the rearrangement sites of a constitutional X/autosome translocation and associated deletion. Am. J. Hum. Genet. 50: 725-741, 1992.
[1479] 230. Gillard, E. F.; Chamberlain, J. S.; Murphy, E. G.; Duff, C. L.; Smith, B.; Burghes, A. H. M.; Thompson, M. W.; Sutherland, J.; Oss, I.; Bodrug, S. E.; Klamut, H. J.; Ray, P. N.; Worton, R. G.: Molecular and phenotypic analysis of patients with deletions within the deletion-rich region of the Duchenne muscular dystrophy (DMD) gene. Am. J. Hum. Genet. 45: 507-520, 1989.
[1480] 231. Ginjaar, I. B.; Kneppers, A. L. J.; Meulen, J.-D. M.; Anderson, L. V. B.; Bremmer-Bout, M.; van Deutekom, J. C. T.; Weegenaar, J.; den Dunnen, J. T.; Bakker, E.: Dystrophin nonsense mutation induces different levels of exon 29 skipping and leads to variable phenotypes within one BMD family. Europ. J. Hum. Genet. 8: 793-796, 2000.
[1481] 232. Gospe, S. M., Jr.; Lazaro, R. P.; Lava, N. S.; Grootscholten, P. M.; Scott, M. O.; Fischbeck, K. H.: Familial X-linked myalgia and cramps: a nonprogressive myopathy associated with a deletion in the dystrophin gene. Neurology 39: 1277-1280, 1989.
[1482] 233. Greenberg, D. S.; Sunada, Y.; Campbell, K. P.; Yaffe, D.; Nudel, U.: Exogenous Dp71 restores the levels of dystrophin associated proteins but does not alleviate muscle damage in mdx mice. Nature Genet. 8: 340-344, 1994.
[1483] 234. Gussoni, E.; Soneoka, Y.; Strickland, C. D.; Buzney, E. A.; Khan, M. K.; Flint, A. F.; Kunkel, L. M.; Mulligan, R. C.: Dystrophin expression in the mdx mouse restored by stem cell transplantation. Nature 401: 390-394, 1999.
[1484] 235. Hagiwara, Y.; Mizuno, Y.; Takemitsu, M.; Matsuzaki, T.; Nonaka, I.; Ozawa, E.: Dystrophin-positive muscle fibers following C2 myoblast transplantation into mdx nude mice. Acta Neuropath. 90: 592-600, 1995.
[1485] 236. Hagiwara, Y.; Nishio, H.; Kitoh, Y.; Takeshima, Y.; Narita, N.; Wada, H.; Yokoyama, M.; Nakamura, H.; Matsuo, M.: A novel point mutation (G(−1) to T) in a 5-prime splice donor site of intron 13 of the dystrophin gene results in exon skipping and is responsible for Becker muscular dystrophy. Am. J. Hum. Genet. 54: 53-61, 1994.
[1486] 237. Hammonds, R. G., Jr.: Protein sequence of DMD gene is related to actin-binding domain of alpha-actinin. (Letter) Cell 51: 1, 1987.
[1487] 238. Harper, S. Q.; Hauser, M. A.; DelloRusso, C.; Duan, D.; Crawford, R. W.; Phelps, S. F.; Harper, H. A.; Robinson, A. S.; Engelhardt, J. F.; Brooks, S. V.; Chamberlain, J. S.: Modular flexibility of dystrophin—implications for gene therapy of Duchenne muscular dystrophy. Nature Med. 8: 253-261, 2002.
[1488] 239. Hart, K. A.; Hodgson, S.; Walker, A.; Cole, C. G.; Johnson, L.; Dubowitz, V.; Bobrow, M.: DNA deletions in mild and severe Becker muscular dystrophy. Hum. Genet. 75: 281-285, 1987.
[1489] 240. Hodgson, S. V.; Abbs, S.; Clark, S.; Manzur, A.; Heckmatt, J. Z. H.; Dubowitz, V.; Bobrow, M.: Correlation of clinical and deletion data in Duchenne and Becker muscular dystrophy, with special reference to mental ability. Neuromusc. Disord. 2: 269-276, 1992.
[1490] 241. Hoffman, E. P.; Brown, R. H., Jr.; Kunkel, L. M.: The protein product of the Duchenne muscular dystrophy locus. Cell 51: 919-928, 1987.
[1491] 242. Hoffman, E. P.; Fischbeck, K. H.; Brown, R. H.; Johnson, M.; Medori, R.; Loike, J. D.; Harris, J. B.; Waterston, R.; Brooke, M.; Specht, L.; Kupsky, W.; Chamberlain, J.; Caskey, C. T.; Shapiro, F.; Kunkel, L. M.: Characterization of dystrophin in muscle-biopsy specimens from patients with Duchenne's or Becker's muscular dystrophy. New Eng. J. Med. 318: 1363-1368, 1988.
[1492] 243. Hoffman, E. P.; Knudson, C. M.; Campbell, K. P.; Kunkel, L. M.: Subcellular fractionation of dystrophin to the triads of skeletal muscle. Nature 330: 754-758, 1987.
[1493] 244. Hoffman, E. P.; Monaco, A. P.; Feener, C. C.; Kunkel, L. M.: Conservation of the Duchenne muscular dystrophy gene in mice and humans. Science 238: 347-350, 1987.
[1494] 245. Hoop, R. C.; Russo, L. S.; Riconda, D. L.; Schwartz, L. S.; Hoffman, E. P.: Restoration of half the normal dystrophin sequence in a double-deletion Duchenne muscular dystrophy family. Am. J. Med. Genet. 49: 323-327, 1994.
[1495] 246. Howard, P. L.; Dally, G. Y.; Wong, M. H.; Ho, A.; Weleber, R. G.; Pillers, D.-A. M.; Ray, P. N.: Localization of dystrophin isoform Dp71 to the inner limiting membrane of the retina suggests a unique functional contribution of Dp71 in the retina. Hum. Molec. Genet. 7: 1385-1391, 1998.
[1496] 247. Hu, X.; Burghes, A. H. M.; Bulman, D. E.; Ray, P. N.; Worton, R. G.: Evidence for mutation by unequal sister chromatid exchange in the Duchenne muscular dystrophy gene. Am. J. Hum. Genet. 44: 855-863, 1989.
[1497] 248. Hu, X.; Burghes, A. H. M.; Ray, P. N.; Thompson, M. W.; Murphy, E. G.; Worton, R. G.: Partial gene duplication in Duchenne and Becker muscular dystrophies. J. Med. Genet. 25: 369-376, 1988.
[1498] 249. Hu, X.; Ray, P. N.; Murphy, E. G.; Thompson, M. W.; Worton, R. G.: Duplicational mutation at the Duchenne muscular dystrophy locus: its frequency, distribution, origin, and phenotype-genotype correlation. Am. J. Hum. Genet. 46: 682-695, 1990.
[1499] 250. Hu, X.; Ray, P. N.; Worton, R. G.: Mechanisms of tandem duplication in the Duchenne muscular dystrophy gene include both homologous and nonhomologous intrachromosomal recombination. EMBO J. 10: 2471-2477, 1991.
[1500] 251. Hu, X.; Worton, R. G.: Partial gene duplication as a cause of human disease. Hum. Mutat. 1: 3-12, 1992.
[1501] 252. Ingram, V. M.: Gene evolution and the haemoglobins. Nature 189: 704-708, 1961.
[1502] 253. Itagaki, Y.; Saida, K.; Iwamura, K.: Regenerative capacity of mdx mouse muscles after repeated applications of myo-necrotic bupivacaine. Acta Neuropath. 89: 380-384, 1995.
[1503] 254. Kaplan, J.-C.; Kahn, A.; Chelly, J.: Illegitimate transcription: its use in the study of inherited disease. Hum. Mutat. 1: 357-360, 1992.
[1504] 255. Kavaslar, G. N.; Telatar, M.; Serdaroglu, P.; Deymeer, F.; Ozdemir, C.; Tolun, A.: Identification of a one-basepair deletion in exon 6 of the dystrophin gene. Hum. Mutat. 6: 85-86, 1995.
[1505] 256. Kilimann, M. W.; Pizzuti, A.; Grompe, M.; Caskey, C. T.: Point mutations and polymorphisms in the human dystrophin gene identified in genomic DNA sequences amplified by multiplex PCR. Hum. Genet. 89: 253-258, 1992.
[1506] 257. Kim, T.-W.; Wu, K.; Black, I. B.: Deficiency of brain synaptic dystrophin in human Duchenne muscular dystrophy. Ann Neurol. 38: 446-449, 1995.
[1507] 258. Kingston, H. M.; Sarfarazi, M.; Thomas, N. S. T.; Harper, P. S.: Localisation of the Becker muscular dystrophy gene on the short arm of the X chromosome by linkage to cloned DNA sequences. Hum. Genet. 67: 6-17, 1984.
[1508] 259. Kingston, H. M.; Thomas, N. S. T.; Pearson, P. L.; Sarfarazi, M.; Harper, P. S.: Genetic linkage between Becker muscular dystrophy and a polymorphic DNA sequence on the short arm of the X chromosome. J. Med. Genet. 20: 255-258, 1983.
[1509] 260. Kneppers, A. L. J.; Deutz-Terlouw, P. P.; van Ommen, G. J. B.; Bakker, E.: Point mutation screening for Duchenne muscular dystrophy (DMD) by SSCP-analysis of multiplex PCR products by use of the PhastSystem™. Am. J. Hum. Genet. Suppl. 53: Abstract-1493, 1993.
[1510] 261. Koenig, M.: Personal Communication. Boston, Mass. Oct. 8, 1987.
[1511] 100. Koenig, M.; Beggs, A. H.; Moyer, M.; Scherpf, S.; Heindrich, K.; Bettecken, T.; Meng, G.; Muller, C. R.; Lindlof, M.; Kaariainen, H.; de la Chapelle, A.; Kiuru, A.; and 24 others: The molecular basis for Duchenne versus Becker muscular dystrophy: correlation of severity with type of deletion. Am. J. Hum. Genet. 45: 498-506, 1989.
[1512] 101. Koenig, M.; Bertelson, C. J.; Monaco, A. P.; Hoffman, E.; Feener, C. C.; Kunkel, L. M.: Complete cloning of the Duchenne muscular dystrophy cDNA and an analysis of the entire DMD locus. (Abstract) Am. J. Hum. Genet. 41: A222, 1987.
[1513] 102. Koenig, M.; Hoffman, E. P.; Bertelson, C. J.; Monaco, A. P.; Feener, C.; Kunkel, L. M.: Complete cloning of the Duchenne muscular dystrophy (DMD) cDNA and preliminary genomic organization of the DMD gene in normal and affected individuals. Cell 50: 509-517, 1987.
[1514] 103. Koenig, M.; Monaco, A. P.; Kunkel, L. M.: The complete sequence of dystrophin predicts a rod-shaped cytoskeletal protein. Cell 53: 219-228, 1988.
[1515] 104. Koh, J.; Bartlett, R. J.; Pericak-Vance, M. A.; Speer, M. C.; Yamaoka, L. H.; Phillips, K.; Hung, W.-Y.; Ray, P. N.; Worton, R. G.; Gilbert, J. R.; Lee, J. E.; Siddique, T.; Kandt, R. S.; Roses, A. D.: Inherited deletion at Duchenne dystrophy locus in normal male. (Letter) Lancet II: 1154-1155, 1987.
[1516] 105. Kunkel, L. M.: Analysis of deletions in DNA from patients with Becker and Duchenne muscular dystrophy. Nature 322: 73-77, 1986.
[1517] 106. Kunkel, L. M.; Monaco, A. P.; Middlesworth, W.; Ochs, H. D.; Latt, S. A.: Specific cloning of DNA fragments absent from the DNA of a male patient with an X chromosome deletion. Proc. Nat. Acad. Sci. 82: 4778-4782, 1985.
[1518] 107. Laing, N. G.; Layton, M. G.; Johnsen, R. D.; Chandler, D. C.; Mears, M. E.; Goldblatt, J.; Kakulas, B. A.: Two distinct mutations in a single dystrophin gene: chance occurrence or premutation? Am. J. Med. Genet. 42: 688-692, 1992.
[1519] 108. Lederfein, D.; Levy, Z.; Augier, N.; Mornet, D.; Morris, G.; Fuchs, O.; Yaffe, D.; Nudel, U.: A 71-kilodalton protein is a major product of the Duchenne muscular dystrophy gene in brain and other nonmuscle tissues. Proc. Nat. Acad. Sci. 89: 5346-5350, 1992.
[1520] 109. Lederfein, D.; Yaffe, D.; Nudel, U.: A housekeeping type promoter, located in the 3-prime region of the Duchenne muscular dystrophy gene, controls the expression of Dp71, a major product of the gene. Hum. Molec. Genet. 2: 1883-1888, 1993.
[1521] 110. Lee, C. C.; Pearlman, J. A.; Chamberlain, J. S.; Caskey, C. T.: Expression of recombinant dystrophin and its localization to the cell membrane. Nature 349: 334-336, 1991.
[1522] 111. Lee, G.-H.; Badorff, C.; Knowlton, K. U.: Dissociation of sarcoglycans and the dystrophin carboxyl terminus from the sarcolemma in enteroviral cardiomyopathy. Circ. Res. 87: 489-495, 2000.
[1523] 112. Lenk, U.; Hanke, R.; Kraft, U.; Grade, K.; Grunewald, I.; Speer, A.: Non-isotopic analysis of single strand conformation polymorphism (SSCP) in the exon 13 region of the human dystrophin gene. J. Med. Genet. 30: 951-954, 1993.
[1524] 113. Lenk, U.; Hanke, R.; Speer, A.: Carrier detection in DMD families with point mutations, using PCR-SSCP and direct sequencing. Neuromusc. Disord. 4: 411-418, 1994.
[1525] 114. Lenk, U.; Hanke, R.; Thiele, H.; Speer, A.: Point mutations at the carboxy terminus of the human dystrophin gene: implications for an association with mental retardation in DMD patients. Hum. Molec. Genet. 2: 1877-1881, 1993.
[1526] 115. Lenk, U.; Oexle, K.; Voit, T.; Ancker, U.; Hellner, K.-A.; Speer, A.; Hubner, C.: A cysteine 3340 substitution in the dystroglycan-binding domain of dystrophin associated with Duchenne muscular dystrophy, mental retardation and absence of the ERG b-wave. Hum. Molec. Genet. 973-975, 1996.
[1527] 116. Liechti-Gallati, S.; Braga, S.; Hirsiger, H.; Moser, H.: Familial deletion in Becker type muscular dystrophy within the pXJ region. Hum. Genet. 77: 267-268, 1987.
[1528] 117. Lindlof, M.; Kaariainen, H.; van Ommen, G. J. B.; de la Chapelle, A.: Microdeletions in patients with X-linked muscular dystrophy: molecular-clinical correlations. Clin. Genet. 33: 131-139, 1988.
[1529] 118. Lindlof, M.; Kiuru, A.; Kaariainen, H.; Kalimo, H.; Lang, H.; Pihko, H.; Rapola, J.; Somer, H.; Somer, M.; Savontaus, M.-L.; de la Chapelle, A.: Gene deletions in X-linked muscular dystrophy. Am. J. Hum. Genet. 44: 496-503, 1989.
[1530] 119. Mankin, A. S.; Liebman, S. W.: Baby, don't stop! Nature Genet. 23: 8-10, 1999.
[1531] 120. Mao, Y.; Cremer, M.: Detection of Duchenne muscular dystrophy carriers by dosage analysis using the DMD cDNA clone 8. Hum. Genet. 81: 193-195, 1989.
[1532] 121. Matsuo, M.; Masumura, T.; Nakajima, T.; Kitoh, Y.; Takumi, T.; Nishio, H.; Koga, J.; Nakamura, H.: A very small frame-shifting deletion within exon 19 of the Duchenne muscular dystrophy gene. Biochem. Biophys. Res. Commun. 170: 963-967, 1990.
[1533] 122. Matsuo, M.; Masumura, T.; Nishio, H.; Nakajima, T.; Kitoh, Y.; Takumi, T.; Koga, J.; Nakamura, H.: Exon skipping during splicing of dystrophin mRNA precursor due to an intraexon deletion in the dystrophin gene of Duchenne muscular dystrophy. J. Clin. Invest. 87: 2127-2131, 1991.
[1534] 123. McArdle, A.; Edwards, R. H. T.; Jackson, M. J.: Time course of changes in plasma membrane permeability in the dystrophin-deficient mdx mouse. Muscle Nerve 17: 1378-1384, 1994.
[1535] 124. McCabe, E. R. B.; Towbin, J.; Chamberlain, J.; Baumbach, L.; Witkowski, J.; van Ommen, G. J. B.; Koenig, M.; Kunkel, L. M.; Seltzer, W. K.: Complementary DNA probes for the Duchenne muscular dystrophy locus demonstrate a previously undetectable deletion in a patient with dystrophic myopathy, glycerol kinase deficiency, and congenital adrenal hypoplasia. J. Clin. Invest. 83: 95-99, 1989.
[1536] 125. Milasin, J.; Muntoni, F.; Severini, G. M.; Bartoloni, L.; Vatta, M.; Krajinovic, M.; Mateddu, A.; Angelini, C.; Camerini, F.; Falaschi, A.; Mestroni, L.; Giacca, M.; Heart Muscle Disease Study Group: A point mutation in the 5-prime splice site of the dystrophin gene first intron responsible for X-linked dilated cardiomyopathy. Hum. Molec. Genet. 5: 73-79, 1996.
[1537] 126. Minetti, C.; Bonilla, E.: Mosaic expression of dystrophin in carriers of Becker's muscular dystrophy and the X-linked syndrome of myalgia and cramps. (Letter) New Eng. J. Med. 327: 1100, 1992.
[1538] 127. Moizard, M.-P.; Toutain, A.; Fournier, D.; Berret, F.; Raynaud, M.; Billard, C.; Andres, C.; Moraine, C.: Severe cognitive impairment in DMD: obvious clinical indication for Dp71 isoform point mutation screening. Europ. J. Hum. Genet. 8: 552-556, 2000.
[1539] 128. Monaco, A. P.; Bertelson, C. J.; Liechti-Gallati, S.; Moser, H.; Kunkel, L. M.: An explanation for phenotypic differences between patients bearing partial deletions of DMD locus. Genomics 2: 90-95, 1988.
[1540] 129. Monaco, A. P.; Kunkel, L. M.: A giant locus for the Duchenne and Becker muscular dystrophy gene. Trends Genet. 3: 33-37, 1987.
[1541] 130. Monaco, A. P.; Neve, R. L.; Colletti-Feener, C.; Bertelson, C. J.; Kurnit, D. M.; Kunkel, L. M.: Isolation of candidate cDNAs for portions of the Duchenne muscular dystrophy gene. Nature 323: 646-650, 1986.
[1542] 131. Muntoni, F.; Cau, M.; Ganau, A.; Congiu, R.; Arvedi, G.; Mateddu, A.; Marrosu, M. G.; Caianchetti, C.; Realdi, G.; Cao, A.; Melis, M. A.: Deletion of the dystrophin muscle-promoter region associated with X-linked dilated cardiomyopathy. New Eng. J. Med. 329: 921-925, 1993.
[1543] 132. Muntoni, F.; Melis, M. A.; Ganau, A.; Dubowitz, V.: Transcription of the dystrophin gene in normal tissues and in skeletal muscle of a family with X-linked dilated cardiomyopathy. Am. J. Hum. Genet. 56: 151-157, 1995.
[1544] 133. Muntoni, F.; Wilson, L.; Marrosu, G.; Marrosu, M. G.; Caianchetti, C.; Mestroni, L.; Ganau, A.; Dubowitz, V.; Sewry, C.: A mutation in the dystrophin gene selectively affecting dystrophin expression in the heart. J. Clin. Invest. 96: 693-699, 1995.
[1545] 134. Nevin, N. C.; Hughes, A. E.; Calwell, M.; Lim, J. H. K.: Duchenne muscular dystrophy in a female with a translocation involving Xp21. J. Med. Genet. 23: 171-187, 1986.
[1546] 135. Nigro, V.; Politano, L.; Nigro, G.; Romano, S. C.; Molinari, A. M.; Puca, G. A.: Detection of a nonsense mutation in the dystrophin gene by multiple SSCP. Hum. Molec. Genet. 1: 517-520, 1992.
[1547] 136. Nobile, C.; Marchi, J.; Nigro, V.; Roberts, R. G.; Danieli, G. A.: Exon-intron organization of the human dystrophin gene. Genomics 45: 421-424, 1997.
[1548] 137. Nobile, C.; Toffolatti, L.; Rizzi, F.; Simionati, B.; Nigro, V.; Cardazzo, B.; Patarnello, T.; Valle, G.; Danieli, G. A.: Analysis of 22 deletion breakpoints in dystrophin intron 49. Hum. Genet. 110: 418-421, 2002.
[1549] 138. Norman, A.; Harper, P.: A survey of manifesting carriers of Duchenne and Becker muscular dystrophy in Wales. Clin. Genet. 36: 31-37, 1989.
[1550] 139. Ohno, S.: Evolution by Gene Duplication. Berlin: Springer-Verlag (pub.) 1970.
[1551] 140. Ortiz-Lopez, R.; Li, H.; Su, J.; Goytia, V.; Towbin, J. A.: Evidence for a dystrophin missense mutation as a cause of X-linked dilated cardiomyopathy. Circulation 95: 2434-2440, 1997.
[1552] 141. Palmucci, L.; Doriguzzi, C.; Mongini, T.; Restagno, G.; Chiado-Piat, L.; Maniscalco, M.: Unusual expression and very mild course of Xp21 muscular dystrophy (Becker type) in a 60-year-old man with 26 percent deletion of the dystrophin gene. Neurology 44: 541-543, 1994.
[1553] 142. Passos-Bueno, M. R.; Bakker, E.; Kneppers, A. L. J.; Takata, R. I.; Rapaport, D.; den Dunnen, J. T.; Zatz, M.; van Ommen, G. J. B.: Different mosaicism frequencies for proximal and distal Duchenne muscular dystrophy (DMD) mutations indicate difference in etiology and recurrence risk. Am. J. Hum. Genet. 51: 1150-1155, 1992.
[1554] 143. Paulson, K. E.; Deka, N.; Schmid, C. W.; Misra, R.; Schindler, C. W.; Rush, M. G.; Kadyk, L.; Leinwand, L.: A transposon-like element in human DNA. Nature 316: 359-361, 1985.
[1555] 144. Pernelle, J.-J.; Chafey, P.; Chelly, J.; Wahrmann, J. P.; Kaplan, J.-C.; Tome, F.; Fardeau, M.: Nebulin seen in DMD males including one patient with a large DNA deletion encompassing the DMD gene. Hum. Genet. 78: 285, 1988.
[1556] 145. Pillers, D.-A. M.; Fitzgerald, K. M.; Duncan, N. M.; Rash, S. M.; White, R. A.; Dwinnell, S. J.; Powell, B. R.; Schnur, R. E.; Ray, P. N.; Cibis, G. W.; Weleber, R. G.: Duchenne/Becker muscular dystrophy: correlation of phenotype by electroretinography with sites of dystrophin mutations. Hum. Genet. 105: 2-9, 1999.
[1557] 146. Pizzuti, A.; Pieretti, M.; Fenwick, R. G.; Gibbs, R. A.; Caskey, C. T.: A transposon-like element in the deletion-prone region of the dystrophin gene. Genomics 13: 594-600, 1992.
[1558] 147. Porter, J. D.; Khanna, S.; Kaminski, H. J.; Rao, J. S.; Merriam, A. P.; Richmonds, C. R.; Leahy, P.; Li, J.; Guo, W.; Andrade, F. H.: A chronic inflammatory response dominates the skeletal muscle molecular signature in dystrophin-deficient mdx mice. Hum. Molec. Genet. 11: 263-272, 2002.
[1559] 148. Prior, T. W.; Papp, A. C.; Snyder, P. J.; Burghes, A. H. M.; Bartolo, C.; Sedra, M. S.; Western, L. M.; Mendell, J. R.: A missense mutation in the dystrophin gene in a Duchenne muscular dystrophy patient. Nature Genet. 4: 357-360, 1993.
[1560] 149. Prior, T. W.; Papp, A. C.; Snyder, P. J.; Burghes, A. H. M.; Sedra, M. S.; Western, L. M.; Bartello, C.; Mendell, J. R.: Identification of two point mutations and a one base deletion in exon 19 of the dystrophin gene by heteroduplex formation. Hum. Molec. Genet. 2: 311-313, 1993.
[1561] 150. Prior, T. W.; Papp, A. C.; Snyder, P. J.; Burghes, A. H. M.; Sedra, M. S.; Western, L. M.; Bartolo, C.; Mendell, J. R.: Exon 44 nonsense mutation in two-Duchenne muscular dystrophy brothers detected by heteroduplex analysis. Hum. Mutat. 2: 192-195, 1993.
[1562] 151. Prior, T. W.; Papp, A. C.; Snyder, P. J.; Sedra, M. S.; Western, L. M.; Bartolo, C.; Moxley, R. T.; Mendell, J. R.: Heteroduplex analysis of the dystrophin gene: application to point mutation and carrier detection. Am. J. Med. Genet. 50: 68-73, 1994.
[1563] 152. Rafael, J. A.; Sunada, Y.; Cole, N. M.; Campbell, K. P.; Faulkner, J. A.; Chamberlain, J. S.: Prevention of dystrophic pathology in mdx mice by a truncated dystrophin isoform. Hum. Molec. Genet. 3: 1725-1733, 1994.
[1564] 153. Rafael, J. A.; Townsend, E. R.; Squire, S. E.; Potter, A. C.; Chamberlain, J. S.; Davies, K. E.: Dystrophin and utrophin influence fiber type composition and post-synaptic membrane structure. Hum. Molec. Genet. 9: 1357-1367, 2000.
[1565] 154. Ray, P. N.; Belfall, B.; Duff, C.; Logan, C.; Kean, V.; Thompson, M. W.; Sylvester, J. E.; Gorski, J. L.; Schmickel, R. D.; Worton, R. G.: Cloning of the breakpoint of an X;21 translocation associated with Duchenne muscular dystrophy. Nature 318: 672-675, 1985.
[1566] 155. Read, A. P.; Mountford, R. C.; Forrest, S. M.; Kenwrick, S. J.; Davies, K. E.; Harris, R.: Patterns of exon deletions in Duchenne and Becker muscular dystrophy. Hum. Genet. 80: 152-156, 1988.
[1567] 156. Rininsland, F.; Hahn, A.; Niemann-Seyde, S.; Slomski, R.; Hanefeld, F.; Reiss, J.: Identification of a new DMD gene deletion by ectopic transcript analysis. J. Med. Genet. 29: 647-651, 1992.
[1568] 157. Roberts, R. G.; Bentley, D. R.; Bobrow, M.: Infidelity in the structure of ectopic transcripts: a novel exon in lymphocyte dystrophin transcripts. Hum. Mutat. 2: 293-299, 1993.
[1569] 158. Roberts, R. G.; Bobrow, M.; Bentley, D. R.: The spectrum of mild X-linked recessive muscular dystrophy. Arch. Neurol. 34: 408-416, 1992.
[1570] 159. Roberts, R. G.; Bobrow, M.; Bentley, D. R.: Point mutations in the dystrophin gene. Proc. Nat. Acad. Sci. 89: 2331-2335, 1992.
[1571] 160. Roberts, R. G.; Gardner, R. J.; Bobrow, M.: Searching for the 1 in 2,400,000: a review of dystrophin gene point mutations. Hum. Mutat. 4: 1-11, 1994.
[1572] 161. Roberts, R. G.; Passos-Bueno, M. R.; Bobrow, M.; Vainzof, M.; Zatz, M.: Point mutation in a Becker muscular dystrophy patient. Hum. Molec. Genet. 2: 75-77, 1992.
[1573] 162. Rowland, L. P.: Biochemistry of muscle membranes in Duchenne muscular dystrophy. Muscle Nerve 3: 3-20, 1980.
[1574] 163. Ryder-Cook, A. S.; Sicinski, P.; Thomas, K.; Davies, K. E.; Worton, R. G.; Barnard, E. A.; Darlison, M. G.; Barnard, P. J.: Localization of the mdx mutation within the mouse dystrophin gene. EMBO J. 7: 3017-3021, 1988.
[1575] 164. Saad, F. A.; Vita, G.; Mora, M.; Morandi. L.; Vitiello, L.; Oliviero, S.; Danieli, G. A.: A novel nonsense mutation in the human dystrophin gene. Hum. Mutat. 2: 314-316, 1993.
[1576] 165. Saad, F. A.; Vita, G.; Toffolatti, L.; Danieli, G. A.: A possible missense mutation detected in the dystrophin gene by double strand conformation analysis (DSCA). Neuromusc. Disord. 4: 335-341, 1994.
[1577] 166. Sakamoto, M.; Yuasa, K.; Yoshimura, M.; Yokota, T.; Ikemoto, T.; Suzuki, M.; Dickson, G.; Miyagoe-Suzuki, Y.; Takeda, S.: Micro-dystrophin cDNA ameliorates dystrophic phenotypes when introduced into mdx mice as a transgene. Biochem. Biophys. Res. Commun. 293: 1265-1272, 2002.
[1578] 167. Sang, R.; Mezger-Lallemand, V.; Gitelman, I.; Davis, C.; Fuchs, O.; Yaffe, D.; Nudel, U.: Targeted inactivation of Dp71, the major non-muscle product of the DMD gene: differential activity of the Dp71 promoter during development. Hum. Molec. Genet. 8: 1-10, 1999.
[1579] 168. Sarkar, G.; Sommer, S. S.: Access to a messenger RNA sequence or its protein product is not limited by tissue or species specificity. Science 244: 331-334, 1989.
[1580] 169. Schwartz, L. S.; Tarleton, J.; Popovich, B.; Seltzer, W. K.; Hoffman, E. P.: Fluorescent multiplex linkage analysis and carrier detection for Duchenne/Becker muscular dystrophy. Am. J. Hum. Genet. 51: 721-729, 1992.
[1581] 170. Scott, M. O.; Sylvester, J. E.; Heiman-Patterson, T.; Shi, Y.-J.; Fieles, W.; Stedman, H.; Burghes, A.; Ray, P.; Worton, R.; Fischbeck, K. H.: Duchenne muscular dystrophy gene expression in normal and diseased human muscle. Science 239: 1418-1420, 1988.
[1582] 171. Sharp, N. J. H.; Kornegay, J. N.; Van Camp, S. D.; Herbstreith, M. H.; Secore, S. L.; Kettle, S.; Hung, W.-Y.; Constantinou, C. D.; Dykstra, M. J.; Roses, A. D.; Bartlett, R. J.: An error in dystrophin mRNA processing in golden retriever muscular dystrophy, an animal homologue of Duchenne muscular dystrophy. Genomics 13: 115-121, 1992.
[1583] 172. Shiga, N.; Takeshima, Y.; Sakamoto, H.; Inoue, K.; Yokota, Y.; Yokoyama, M.; Matsuo, M.: Disruption of the splicing enhancer sequence within exon 27 of the dystrophin gene by a nonsense mutation induces partial skipping of the exon and is responsible for Becker muscular dystrophy. J. Clin. Invest. 100: 2204-2210, 1997.
[1584] 173. Sicinski, P.; Geng, Y.; Ryder-Cook, A. S.; Barnard, E. A.; Darlison, M. G.; Barnard, P. J.: The molecular basis of muscular dystrophy in the mdx mouse: a point mutation. Science 244: 1578-1580, 1989.
[1585] 174. Smithies, O.; Connell, G. E.; Dixon, G. H.: Chromosomal rearrangements and the evolution of haptoglobin genes. Nature 196: 232-236, 1962.
[1586] 175. Southern, E. M.: Detection of specific sequences among DNA fragments separated by gel electrophoresis. J. Molec. Biol. 98: 503-517, 1975.
[1587] 176. Stratford-Perricaudet, L. D.; Makeh, I.; Perricaudet, M.; Briand, P.: Widespread long-term gene transfer to mouse skeletal muscles and heart. J. Clin. Invest. 90: 626-630, 1992.
[1588] 177. Takeshima, Y.; Nishio, H.; Narita, N.; Wada, H.; Ishikawa, Y.; Ishikawa, Y.; Minami, R.; Nakamura, H.; Matsuo, M.: Amino-terminal deletion of 53% of dystrophin results in an intermediate Duchenne-Becker muscular dystrophy phenotype. Neurology 44: 1648-1651, 1994.
[1589] 178. Tennyson, C. N.; Klamut, H. J.; Worton, R. G.: The human dystrophin gene requires 16 hours to be transcribed and is cotranscriptionally spliced. Nature Genet. 9: 184-190, 1995.
[1590] 179. Tinsley, J. M.; Blake, D. J.; Davies, K. E.: Apo-dystrophin-3: a 2.2 kb transcript from the DMD locus encoding the dystrophin glycoprotein binding site. Hum. Molec. Genet. 2: 521-524, 1993.
[1591] 180. Tinsley, J. M.; Potter, A. C.; Phelps, S. R.; Fisher, R.; Trickett, J. I.; Davies, K. E.: Amelioration of the dystrophic phenotype of mdx mice using a truncated utrophin transgene. Nature 384: 349-353, 1996.
[1592] 181. Todorova, A.; Danieli, G. A.: Large majority of single-nucleotide mutations along the dystrophin gene can be explained by more than one mechanism of mutagenesis. Hum. Mutat. 9: 537-547, 1997.
[1593] 182. Torelli, S.; Muntoni, F.: Alternative splicing of dystrophin exon 4 in normal human muscle. Hum. Genet. 97: 521-523, 1996.
[1594] 183. Towbin, J. A.; Hejtmancik, J. F.; Brink, P.; Gelb, B.; Zhu, X. M.; Chamberlain, J. S.; McCabe, E. R. B.; Swift, M.: X-linked dilated cardiomyopathy: molecular genetic evidence of linkage to the Duchenne muscular dystrophy (dystrophin) gene at the Xp21 locus. Circulation 87: 1854-1865, 1993.
[1595] 184. Towbin, J. A.; Ortiz-Lopez, R.: X-linked dilated cardiomyopathy. (Letter) New Eng. J. Med. 330: 369-370, 1994.
[1596] 185. Towbin, J. A.; Zhu, X. M.; Gelb, B.; Bies, R.; Chamberlain, J.; Maichele, A.; Ohlendieck, K.; Campbell, K.; McCabe, E. R. B.; Swift, M.: X-linked dilated cardiomyopathy (XLCM): molecular characterization. (Abstract) Am. J. Hum. Genet. 49 (suppl.): 421, 1991.
[1597] 186. Tuffery, S.; Lenk, U.; Roberts, R. G.; Coubes, C.; Demaille, J.; Claustres, M.: Protein truncation test: analysis of two novel point mutations at the carboxy-terminus of the human dystrophin gene associated with mental retardation. Hum. Mutat. 6: 126-135, 1995.
[1598] 187. Valentine, B. A.; Winand, N. J.; Pradhan, D.; Moise, N. S.; de Lahunta, A.; Kornegay, J. N.; Cooper, B. J.: Canine X-linked muscular dystrophy as an animal model of Duchenne muscular dystrophy: a review. Am. J. Med. Genet. 42: 352-356, 1992.
[1599] 188. Verellen-Dumoulin, C.; Freund, M.; De Meyer, R.; Laterre, C.; Frederic, J.; Thompson, M. W.; Markovic, V. D.; Worton, R. G.: Expression of an X-linked muscular dystrophy in a female due to translocation involving Xp21 and non-random inactivation of the normal X chromosome. Hum. Genet. 67: 115-119, 1984.
[1600] 189. Wehling, M.; Spencer, M. J.; Tidball, J. G.: A nitric oxide synthase transgene ameliorates muscular dystrophy in mdx mice. J. Cell Biol. 155: 123-131, 2001.
[1601] 190. Werner, W.; Spiegler, A. W. J.: Inherited deletion of subband Xp21.13 in a male with Duchenne muscular dystrophy. J. Med. Genet. 25: 377-382, 1988.
[1602] 191. Wilton, S. D.; Chandler, D. C.; Kakulas, B. A.; Laing, N. G.: Identification of a point mutation and germinal mosaicism in a Duchenne muscular dystrophy family. Hum. Mutat. 3: 133-140, 1994.
[1603] 192. Wilton, S. D.; Johnsen, R. D.; Pedretti, J. R.; Laing, N. G.: Two distinct mutations in a single dystrophin gene: identification of an altered splice-site as the primary Becker muscular dystrophy mutation. Am. J. Med. Genet. 46: 563-569, 1993.
[1604] 193. Winnard, A. V.; Jia-Hsu, Y.; Gibbs, R. A.; Mendell, J. R.; Burghes, A. H. M.: Identification of a 2 base pair nonsense mutation causing a cryptic splice site in a DMD patient. Hum. Molec. Genet. 1: 645-646, 1992.
[1605] 194. Wood, D. S.; Zeviani, M.; Prelle, A.; Bonilla, E.; Salviati, G.; Miranda, A. F.; DiMauro, S.; Rowland, L. P.: Is nebulin the defective gene product in Duchenne muscular dystrophy? (Letter) New Eng. J. Med. 316: 107-108, 1987.
[1606] 195. Worton, R. G.: Dystrophin—the long and short of it. (Editorial) J. Clin. Invest. 93: 4, 1994.
[1607] 196. Worton, R. G.: Personal Communication. Toronto, Ontario, Canada Sep. 12, 1987.
[1608] 197. Xiong, D.; Lee, G.-H.; Badorff, C.; Dorner, A.; Lee, S.; Wolf, P.; Knowlton, K. U.: Dystrophin deficiency markedly increases enterovirus-induced cardiomyopathy: a genetic predisposition to viral heart disease. Nature Med. 8: 872-877, 2002.
[1609] 198. Yang, T. P.; Patel, P. I.; Chinault, A. C.; Stout, J. T.; Jackson, L. G.; Hildebrand, B. M.; Caskey, C. T.: Molecular evidence for new mutation at the HPRT locus in Lesch-Nyhan patients. Nature 310: 412-414, 1984.
[1610] 199. Yoshida, K.; Ikeda, S.; Nakamura, A.; Kagoshima, M.; Takeda, S.; Shoji, S.; Yanagisawa, N.: Molecular analysis of the Duchenne muscular dystrophy gene in patients with Becker muscular dystrophy presenting with dilated cardiomyopathy. Muscle Nerve 16: 1161-1166, 1993.
[1611] 200. Yoshida, K.; Nakamura, A.; Yazaki, M.; Ikeda, S.; Takeda, S.: Insertional mutation by transposable element, L1, in the DMD gene results in X-linked dilated cardiomyopathy. Hum. Molec. Genet. 7: 1129-1132, 1998.
[1612] 201. Zubrzycka-Gaarn, E. E.; Bulman, D. E.; Karpati, G.; Burghes, A. H. M.; Belfall, B.; Klamut, H. J.; Talbot, J.; Hodges, R. S.; Ray, P. N.; Worton, R. G.: The Duchenne muscular dystrophy gene product is localized in sarcolemma of human skeletal muscle. Nature 333: 466-469, 1988.
[1613] 262. Basarab, T.; Smith, F. J. D.; Jolliffe, V. M. L.; McLean, W. H. I.; Neill, S.; Rustin, M. H. A.; Eady, R. A. J.: Ichthyosis bullosa of Siemens: report of a family with evidence of a keratin 2e mutation, and a review of the literature. Brit. J. Derm. 140: 689-695, 1999.
[1614] 263. Collin, C.; Moll, R.; Kubicka, S.; Ouhayoun, J.-P.; Franke, W. W.: Characterization of human cytokeratin 2, an epidermal cytoskeletal protein synthesized late during differentiation. Exp. Cell Res. 202: 132-141, 1992.
[1615] 264. Kremer, H.; Zeeuwen, P.; McLean, W. H. I.; Mariman, E. C. M.; Lane, E. B.; van de Kerkhof, P. C. M.; Ropers, H.-H.; Steijlen, P. M.: Ichthyosis bullosa of Siemens is caused by mutations in the keratin 2e gene. J. Invest. Derm. 103: 286-289, 1994.
[1616] 265. McLean, W. H. I.; Morley, S. M.; Lane, E. B.; Eady, R. A. J.; Griffiths, W. A. D.; Paige, D. G.; Harper, J. I.; Higgins, C.; Leigh, I. M.: Ichthyosis bullosa of Siemens—a disease involving keratin 2e. J. Invest. Derm. 103: 277-281, 1994.
[1617] 266. Rothnagel, J. A.; Traupe, H.; Wojcik, S.; Huber, M.; Hohl, D.; Pittelkow, M. R.; Saeki, H.; Ishibashi, Y.; Roop, D. R.: Mutations in the rod domain of keratin 2e in patients with ichthyosis bullosa of Siemens. Nature Genet. 7: 485-490, 1994.
[1618] 267. Smith, F. J. D.; Maingi, C.; Covello, S. P.; Higgins, C.; Schmidt, M.; Lane, E. B.; Uitto, J.; Leigh, I. M.; McLean, W. H. I.: Genomic organization and fine mapping of the keratin 2e gene (KRT2E): K2e V1 domain polymorphism and novel mutations in ichthyosis bullosa of Siemens. J. Invest. Derm. 111: 817-821, 1998.
[1619] 268. Takizawa, Y.; Akiyama, M.; Nagashima, M.; Shimizu, H.: A novel asparagine-aspartic acid mutation in the rod 1A domain in keratin 2e in a Japanese family with ichthyosis bullosa of Siemens J. Invest. Derm. 114: 193-195, 2000.
[1620] 269. Yang, J.-M.; Lee, S.; Bang, H.-D.; Kim, W.-S.; Lee, E.-S.; Steinert, P. M.: A novel threonine-to-proline mutation at the end of 2B rod domain in the keratin 2e chain in ichthyosis bullosa of Siemens. J. Invest. Derm. 109: 116-118, 1997.
[1621] 270. Khaleghpour, K.; Svitkin, Y. V.; Craig, A. W.; DeMaria, C. T.; Deo, R. C.; Burley, S. K.; Sonenberg, N.: Translational repression by a novel partner of human poly(A) binding protein, Paip2. Molec. Cell 7: 205-216, 2001.
[1622] 271. Scott, A. F.: Personal Communication. Baltimore, Md. Mar. 13, 2001.
[1623] 272. Fulop, V.; Bocskei, Z.; Polgar, L.: Prolyl oligopeptidase: an unusual beta-propeller domain regulates proteolysis. Cell 94: 161-170, 1998.
[1624] 273. Goossens, F. J.; Wauters, J. G.; Vanhoof, G. C.; Bossuyt, P. J.; Schatteman, K. A.; Loens, K.; Scharpe, S. L.: Subregional mapping of the human lymphocyte prolyl oligopeptidase gene (PREP) to human chromosome 6q22. Cytogenet. Cell Genet. 74: 99-101, 1996.
[1625] 274. Vanhoof, G.; Goossens, F.; Hendriks, L.; De Meester, I.; Hendriks, D.; Vriend, G.; Van Broeckhoven, C.; Scharpe, S.: Cloning and sequence analysis of the gene encoding human lymphocyte prolyl endopeptidase. Gene 149: 363-366, 1994.
[1626] 275. Nagase, T.; Ishikawa, K.; Suyama, M.; Kikuno, R.; Hirosawa, M.; Miyajima, N.; Tanaka, A.; Kotani, H.; Nomura, N.; Ohara, O.: Prediction of the coding sequences of unidentified human genes. XII. The complete sequences of 100 new cDNA clones from brain which code for large proteins in vitro. DNA Res. 5: 355-364, 1998.
[1627] 276. Suetsugu, S.; Miki, H.; Takenawa, T.: Identification of two human WAVE/SCAR homologues as general actin regulatory molecules which associate with the Arp2/3 complex. Biochem. Biophys. Res. Commun. 260: 296-302, 1999.
[1628] 277. Disteche, C. M.; Plowman, G. D.; Gronwald, R. G. K.; Kelly, J.; Bowen-Pope, D.; Adler, D. A.; Murray, J. C.: Mapping of the amphiregulin and the platelet-growth factor receptor alpha genes to the proximal long arm of chromosome 4. (Abstract) Cytogenet. Cell Genet. 51: 990, 1989.
[1629] 278. Gronwald, R. G. K.; Adler, D. A.; Kelly, J. D.; Disteche, C. M.; Bowen-Pope, D. F.: The human PDGF receptor alpha-subunit gene maps to chromosome 4 in close proximity to c-kit. Hum. Genet. 85: 383-385, 1990.
[1630] 279. Helwig, U.; Imai, K.; Schmahl, W.; Thomas, B. E.; Varnum, D. S.; Nadeau, J. H.; Balling, R.: Interaction between undulated and Patch leads to an extreme form of spina bifida in double-mutant mice. Nature Genet. 11: 60-63, 1995.
[1631] 280. Hol, F. A.; Geurds, M. P. A.; Chatkupt, S.; Shugart, Y. Y.; Balling, R.; Schrander-Stumpel, C. T. R. M.; Johnson, W. G.; Hamel, B. C. J.; Mariman, E. C. M.: PAX genes and human neural tube defects: an amino acid substitution in PAX1 in a patient with spina bifida. J. Med. Genet. 8: 655-660, 1996.
[1632] 281. Hsieh, C.-L.; Navankasattusas, S.; Escobedo, J. A.; Williams, L. T.; Francke, U.: Chromosomal localization of the gene for AA-type platelet-derived growth factor receptor (PDGFRA) in humans and mice. Cytogenet. Cell Genet. 56: 160-163, 1991.
[1633] 282. Ikuno, Y.; Kazlauskas, A.: TGF-beta-1-dependent contraction of fibroblasts is mediated by th PDGF-alpha receptor. Invest. Ophthal. Vis. Sci. 43: 41-46, 2002.
[1634] 283. Joosten, P. H. L. J.; Hol, F. A.; van Beersum, S. E. C.; Peters, H.; Hamel, B. C. J.; Afink, G. B.; van Zoelen, E. J. J.; Mariman, E. C. M.: Altered regulation of platelet-derived growth factor receptor-alpha gene-transcription in vitro by spina bifida-associated mutant Pax1 proteins. Proc. Nat. Acad. Sci. 95: 14459-14463, 1998.
[1635] 284. Joosten, P. H. L. J.; Toepoel, M.; Mariman, E. C. M.; Van Zoelen, E. J. J.: Promoter haplotype combinations of the platelet-derived growth factor alpha-receptor gene predispose to human neural tube defects. Nature Genet. 27: 215-217, 2001.
[1636] 285. Kawagishi, J.; Kumabe, T.; Yoshimoto, T.; Yamamoto, T.: Structure, organization, and transcription units of the human alpha-platelet-derived growth factor receptor gene, PDGFRA. Genomics 30: 224-232, 1995.
[1637] 286. Klinghoffer, R. A.; Mueting-Nelsen, P. F.; Faerman, A.; Shani, M.; Soriano, P.: The two PDGF receptors maintain conserved signaling in vivo despite divergent embryological functions. Molec. Cell 7: 343-354, 2001.
[1638] 287. Matsui, T.; Heidaran, M.; Miki, T.; Popescu, N.; La Rochelle, W.; Kraus, M.; Pierce, J.; Aaronson, S.: Isolation of a novel receptor cDNA establishes the existence of two PDGF receptor genes. Science 243: 800-804, 1989.
[1639] 288. Phillips, S. A.; Barr, V. A.; Haft, D. H.; Taylor, S. I.; Haft, C. R.: Identification and characterization of SNX15, a novel sorting nexin involved in protein trafficking J. Biol. Chem. 276: 5074-5084, 2001.
[1640] 289. Roberts, W. M.; Look, A. T.; Ruossel, M. F.; Sherr, C. J.: Tandem linkage of human CSF-1 receptor (c-fms) and PDGF receptor genes. Cell 55: 655-661, 1988.
[1641] 290. Smith, E. A.; Seldin, M. F.; Martinez, L.; Watson, M. L.; Ghosh Choudhury, G.; Lalley, P. A.; Pierce, J.; Aaronson, S.; Barker, J.; Naylor, S. L.; Sakaguchi, A. Y.: Mouse platelet-derived growth factor receptor alpha gene is deleted in W-19H and patch mutations on chromosome 5. Proc. Nat. Acad. Sci. 88: 4811-4815, 1991.
[1642] 291. Stenman, G.; Eriksson, A.; Claesson-Welsh, L.: Human PDGFA receptor gene maps to the same region on chromosome 4 as the KIT oncogene. Genes Chromosomes Cancer 1: 155-158, 1989.
[1643] 292. Stephenson, D. A.; Mercola, M.; Anderson, E.; Wang, C.; Stiles, C. D.; Bowen-Pope, D. F.; Chapman, V. M.: Platelet-derived growth factor receptor alpha-subunit gene (Pdgfra) is deleted in the mouse patch (Ph) mutation. Proc. Nat. Acad. Sci. 88: 6-10, 1991.
[1644] 293. Xie, J.; Aszterbaum, M.; Zhang, X.; Bonifas, J. M.; Zachary, C.; Epstein, E.; McCormick, F.: A role of PDGFR-alpha in basal cell carcinoma proliferation. Proc. Nat. Acad. Sci. 98: 9255-9259, 2001.

The application's sequence listing, which the Patent Office published only in electronic form, follows.

SEQUENCE LISTING (17608 sequences)

SEQ ID NO: 1 - DNA, 131 bp, Equine herpesvirus 2
tacatatcttgaatgtgatccattatatattgagtcattagagccattaaaaaatttaaaatatttaattttaaataatattgtaaataatgacattaaattgccaaaatcgattatatatattaaatgta

SEQ ID NO: 2 - DNA, 24 bp, Equine herpesvirus 2
ataatattgtaaataatgacatta

SEQ ID NO: 3 - DNA, 24 bp, Equine herpesvirus 2
agccattaaaaaatttaaaatatt

SEQ ID NO: 4 - DNA, 20 bp, Homo sapiens
caatattgagtgatgacatt

SEQ ID NO: 5 - DNA, 17 bp, Homo sapiens
agccattaaaaatttaa

SEQ ID NO: 6 - DNA, 17 bp, Homo sapiens
gccattaaggatttaaa

SEQ ID NO: 7 - DNA, 98 bp, Equine herpesvirus 2
ccgcgcgcgcatgactacctgggccaggttgagcgccaccaggcggttgaagggcgcctgcaggcgcagggcgtggtgcaggtagttgagggtggtgg

SEQ ID NO: 8 - DNA, 24 bp, Equine herpesvirus 2
catgactacctgggccaggttgag

SEQ ID NO: 9 - DNA, 24 bp, Equine herpesvirus 2
caggcgcagggcgtggtgcaggta

SEQ ID NO: 10 - DNA, 15 bp, Homo sapiens
actgcctaaggttga

SEQ ID NO: 11 - DNA, 22 bp, Homo sapiens
atggccacctggaacaaggttg

SEQ ID NO: 12 - DNA, 20 bp, Homo sapiens
tggctgcctgggccctgctg

SEQ ID NO: 13 - DNA, 17 bp, Homo sapiens
tgactctttgaagttga

SEQ ID NO: 14 - DNA, 22 bp, Homo sapiens
atgctatgcacctcaggttgag

SEQ ID NO: 15 - DNA, 19 bp, Homo sapiens
caggggcagggtgtgcgtg

SEQ ID NO: 16 - DNA, 24 bp, Homo sapiens
caggcgtggtggcgtgcacctgta

SEQ ID NO: 17 - DNA, 19 bp, Homo sapiens
caggtgggggtgtgagcag

SEQ ID NO: 18 - DNA, 20 bp, Homo sapiens
ggctgcagggccgttgggta

SEQ ID NO: 19 - DNA, 21 bp, Homo sapiens
ggtgcagggcgctgtgggggt

SEQ ID NO: 20 - DNA, 22 bp, Homo sapiens
ggcgcggagcgcgtgctgggta

SEQ ID NO: 21 - DNA, 20 bp, Homo sapiens
caggtgcagggctgcaaggt

SEQ ID NO: 22 - DNA, 19 bp, Homo sapiens
ggcgcggggcgcagagggt

SEQ ID NO: 23 - DNA, 24 bp, Homo sapiens
caggcgtggtggtgtgtgcctgta

SEQ ID NO: 24 - DNA, 17 bp, Homo sapiens
ggcgcggggcgcggggt

SEQ ID NO: 25 - DNA, 24 bp, Homo sapiens
cagagcgcagggtgcccacgggta

SEQ ID NO: 26 - DNA, 19 bp, Homo sapiens
agagcgcggggctgcaggt

SEQ ID NO: 27 - DNA, 22 bp, Homo sapiens
caggtgcagggtgcggctaagt

SEQ ID NO: 28 - DNA, 19 bp, Homo sapiens
agtgcaggtgagtgtaggt

SEQ ID NO: 29 - DNA, 20 bp, Homo sapiens
gggtgtcgggcgcggcgggt

SEQ ID NO: 30 - DNA, 20 bp, Homo sapiens
ggcgcggggggttggggggt

SEQ ID NO: 31 - DNA, 20 bp, Homo sapiens
ggcgcgggccacgggcgggt

SEQ ID NO: 32 - DNA, 23 bp, Homo sapiens
caggtgcagaggccaggtgggta

SEQ ID NO: 33 - DNA, 19 bp, Homo sapiens
aggggcggggcgtgggggt

SEQ ID NO: 34 - DNA, 26 bp, Homo sapiens
caggggcagggcgggcacttgcaggt

SEQ ID NO: 35 - DNA, 20 bp, Homo sapiens
ggtgcagggctgagcaggta

SEQ ID NO: 36 - DNA, 19 bp, Homo sapiens
ggggcagggcggagggggt

SEQ ID NO: 37 - DNA, 17 bp, Homo sapiens
gacgcgggagtgtaggt

SEQ ID NO: 38 - DNA, 17 bp, Homo sapiens
ggcgcgaggctgcgggt

SEQ ID NO: 39 - DNA, 23 bp, Homo sapiens
ggcgcagggccaccgtagcgggt

SEQ ID NO: 40 - DNA, 64 bp, Equine herpesvirus 2
tcaataatataccgcacacttttattgccccttttgtggcgtggtgattggcggagagggttgg

SEQ ID NO: 41 - DNA, 24 bp, Equine herpesvirus 2
taccgcacacttttattgcccctt

SEQ ID NO: 42 - DNA, 24 bp, Equine herpesvirus 2
cgtggtgattggcggagagggttg

SEQ ID NO: 43 - DNA, 22 bp, Homo sapiens
gctgtcagccccattgtccctt

SEQ ID NO: 44 - DNA, 19 bp, Homo sapiens
ccgcacccctctgctcctt

SEQ ID NO: 45 - DNA, 16 bp, Homo sapiens
cgctcacatgcccctt

SEQ ID NO: 46 - DNA, 20 bp, Homo sapiens
ggtgattggtggtgcagttg

SEQ ID NO: 47 - DNA, 94 bp, Equine herpesvirus 2
cactctgttacccctttttaactctctaacatttttctttgttttataagatataggcccaggaagatattcatttggaggggtgaactgaatg

SEQ ID NO: 48 - DNA, 24 bp, Equine herpesvirus 2
tgttacccctttttaactctctaa

SEQ ID NO: 49 - DNA, 24 bp, Equine herpesvirus 2
cccaggaagatattcatttggagg

SEQ ID NO: 50 - DNA, 23 bp, Homo sapiens
tgttaccctttttgatttttcta

SEQ ID NO: 51 - DNA, 17 bp, Homo sapiens
tgtatcccttttactct

SEQ ID NO: 52 - DNA, 17 bp, Homo sapiens
gttacttttcctctcta

SEQ ID NO: 53 - DNA, 23 bp, Homo sapiens
tgtatgccctttctcactgttct

SEQ ID NO: 54 - DNA, 23 bp, Homo sapiens
tgttatcccttctacatttctaa

SEQ ID NO: 55 - DNA, 18 bp, Homo sapiens
tgctactccaactctcta

SEQ ID NO: 56 - DNA, 17 bp, Homo sapiens
tgtttccctctttctct

SEQ ID NO: 57 - DNA, 21 bp, Homo sapiens
tgctacccctccagtttctct

SEQ ID NO: 58 - DNA, 18 bp, Homo sapiens
tgttctcccagctctcta

SEQ ID NO: 59 - DNA, 18 bp, Homo sapiens
tgctaccctttttttcct

SEQ ID NO: 60 - DNA, 21 bp, Homo sapiens
ccaggaaggtgtcaaacgagg

SEQ ID NO: 61 - DNA, 17 bp, Homo sapiens
ccagaggaagatttggg

SEQ ID NO: 62 - DNA, 18 bp, Homo sapiens
caggaagatatgtatccg

SEQ ID NO: 63 - DNA, 22 bp, Homo sapiens
cccaggatgggtcttttggagg

SEQ ID NO: 64 - DNA, 19 bp, Homo sapiens
cctggggagaagcctggag

SEQ ID NO: 65 - DNA, 23 bp, Homo sapiens
cctgaggaaggcggctttggagg

SEQ ID NO: 66 - DNA, 15 bp, Homo sapiens
caggaagatgtttgg

SEQ ID NO: 67 - DNA, 18 bp, Homo sapiens
agaaaggacatttggagg

SEQ ID NO: 68 - DNA, 22 bp, Homo sapiens
ccaggaaggttattcatataag

SEQ ID NO: 69 - DNA, 19 bp, Homo sapiens
cccaggcagatattcaagg

SEQ ID NO: 70 - DNA, 17 bp, Homo sapiens
ccaggagggatttggag

SEQ ID NO: 71 - DNA, 17 bp, Homo sapiens
ccaggggcccatttggg

SEQ ID NO: 72 - DNA, 16 bp, Homo sapiens
cccaggaagttggggg

SEQ ID NO: 73 - DNA, 21 bp, Homo sapiens
ccttgggaacatgtttggagg

SEQ ID NO: 74 - DNA, 76 bp, Equine herpesvirus 2
ttctgcacaagacagattgagcaaggatctccgttttaccacacacagatcctaacccaatctatcttacacagaa

SEQ ID NO: 75 - DNA, 24 bp, Equine herpesvirus 2
acagatcctaacccaatctatctt

SEQ ID NO: 76 - DNA, 24 bp, Equine herpesvirus 2
cacaagacagattgagcaaggatc

SEQ ID NO: 77 - DNA, 22 bp, Homo sapiens
aggtcctaccccaacgacactt

SEQ ID NO: 78 - DNA, 17 bp, Homo sapiens
gatcctaaagtctgtct

SEQ ID NO: 79 - DNA, 19 bp, Homo sapiens
aatcctataggtctatctt

SEQ ID NO: 80 - DNA, 15 bp, Homo sapiens
acaagacaggtggga

SEQ ID NO: 81 - DNA, 20 bp, Homo sapiens
caaaacagaaataaggggat

SEQ ID NO: 82 - DNA, 17 bp, Homo sapiens
caagtggacacaaggat

SEQ ID NO: 83 - DNA, 21 bp, Homo sapiens
cacgagataggtaacaaggat

SEQ ID NO: 84 - DNA, 17 bp, Homo sapiens
cataagacggagcaagg

SEQ ID NO: 85 - DNA, 16 bp, Homo sapiens
tgaagacagaacaggg

SEQ ID NO: 86 - DNA, 25 bp, Homo sapiens
cacgtgacagattgagagtgtgatc

SEQ ID NO: 87 - DNA, 21 bp, Homo sapiens
acagtgatgggcccaaggatc

SEQ ID NO: 88 - DNA, 16 bp, Homo sapiens
cacaaaacaggtagga

SEQ ID NO: 89 - DNA, 96 bp, Equine herpesvirus 2
tgtagcatgtttaaaaaagtaacaagtcaccgcctcatcacctgctgtgtttaaggtaggttttgggggcttactgcttttttaaaaaaatttata

SEQ ID NO: 90 - DNA, 24 bp, Equine herpesvirus 2
aaagtaacaagtcaccgcctcatc

SEQ ID NO: 91 - DNA, 24 bp, Equine herpesvirus 2
tactgcttttttaaaaaaatttat

SEQ ID NO: 92 - DNA, 18 bp, Homo sapiens
aaagcaacaagtcatcac

SEQ ID NO: 93 - DNA, 18 bp, Homo sapiens
aaagaacaagtcacctct

SEQ ID NO: 94 - DNA, 20 bp, Homo sapiens
aaagtaacaagtgtcgtgtc

SEQ ID NO: 95 - DNA, 21 bp, Homo sapiens
gtaacaagtccacttgtacac

SEQ ID NO: 96 - DNA, 18 bp, Homo sapiens
tgcttttttaaaaaaact

SEQ ID NO: 97 - DNA, 73 bp, Equine herpesvirus 2
cggtgtcgcgcagggcgtagagcttgggggcgagcaggaccgtctcggagctgtgggcgtcgctgcggcagcg

SEQ ID NO: 98 - DNA, 24 bp, Equine herpesvirus 2
tcggagctgtgggcgtcgctgcgg

SEQ ID NO: 99 - DNA, 24 bp, Equine herpesvirus 2
gcgcagggcgtagagcttgggggc

SEQ ID NO: 100 - DNA, 16 bp, Homo sapiens
ggcgctgtccgctgcg

SEQ ID NO: 101 - DNA, 18 bp, Homo sapiens
gggctgtggcccctgtgg

SEQ ID NO: 102 - DNA, 18 bp, Homo sapiens
tcggggctggggcttgcg

SEQ ID NO: 103 - DNA, 23 bp, Homo sapiens
tcggggctgtggcctccaagcgg

SEQ ID NO: 104 - DNA, 15 bp, Homo sapiens
ggagctggttgctgg

SEQ ID NO: 105 - DNA, 16 bp, Homo sapiens
ggagctgtgagtgctg

SEQ ID NO: 106 - DNA, 22 bp, Homo sapiens
gggcctcagtggggcttggggg

SEQ ID NO: 107 - DNA, 19 bp, Homo sapiens
gcgcgggctgtgccggggg

SEQ ID NO: 108 - DNA, 17 bp, Homo sapiens
gcagggcgctgtggggg

SEQ ID NO: 109 - DNA, 17 bp, Homo sapiens
gcagggcgtggagtcga

SEQ ID NO: 110 - DNA, 17 bp, Homo sapiens
gcgcggggcgcagaggg

SEQ ID NO: 111 - DNA, 21 bp, Homo sapiens
gcgcggggcctggagcgctgg

SEQ ID NO: 112 - DNA, 18 bp, Homo sapiens
gcgtggggtgcgcggggg

SEQ ID NO: 113 - DNA, 23 bp, Homo sapiens
gcgtaaggagggggtttgggggc

SEQ ID NO: 114 - DNA, 19 bp, Homo sapiens
gcggggcaggcttgggggc

SEQ ID NO: 115 - DNA, 18 bp, Homo sapiens
gggcggagccttgggggc

SEQ ID NO: 116 - DNA, 20 bp, Homo sapiens
gcagggcgggagagccgggc

SEQ ID NO: 117 - DNA, 16 bp, Homo sapiens
gcccagggcgtggggg

SEQ ID NO: 118 - DNA, 16 bp, Homo sapiens
gcccagggtgtggggc

SEQ ID NO: 119 - DNA, 19 bp, Homo sapiens
gcagggcgtgggcgaaggc

SEQ ID NO: 120 - DNA, 18 bp, Homo sapiens
gcgcggggcgcagagcgg

SEQ ID NO: 121 - DNA, 19 bp, Homo sapiens
gcgcagggcggggatgggg

SEQ ID NO: 122 - DNA, 22 bp, Homo sapiens
cgcagggcgtggacgcccgggg

SEQ ID NO: 123 - DNA, 16 bp, Homo sapiens
gcgcggggcgcggggc

SEQ ID NO: 124 - DNA, 20 bp, Homo sapiens
gcgcagggcctgggcttggg

SEQ ID NO: 125 - DNA, 18 bp, Homo sapiens
gcggggcgtaggggtggg

SEQ ID NO: 126 - DNA, 62 bp, Equine herpesvirus 2
ccacgggcccggtgactcggaacctgaaagagagttccacggaatcaatgtcggcatcgtgg

SEQ ID NO: 127 - DNA, 24 bp, Equine herpesvirus 2
ttccacggaatcaatgtcggcatc

SEQ ID NO: 128 - DNA, 24 bp, Equine herpesvirus 2
gcccggtgactcggaacctgaaag

SEQ ID NO: 129 - DNA, 16 bp, Homo sapiens
ggaatcaaaacacatc

SEQ ID NO: 130 - DNA, 17 bp, Homo sapiens
tcccacggagtctcggc

SEQ ID NO: 131 - DNA, 24 bp, Homo sapiens
gccctgggccttggagcctgaaag

SEQ ID NO: 132 - DNA, 16 bp, Homo sapiens
ggtgctttcctgaaag

SEQ ID NO: 133 - DNA, 16 bp, Homo sapiens
gcctgatgaccctgaa

SEQ ID NO: 134 - DNA, 15 bp, Homo sapiens
gcccggcgaagcctg

SEQ ID NO: 135 - DNA, 20 bp, Homo sapiens
ccggtgacttgatcagggaa

SEQ ID NO: 136 - DNA, 22 bp, Homo sapiens
gctcgggccgtctcggagtctg

SEQ ID NO: 137 - DNA, 18 bp, Homo sapiens
gcctgatggggcctggaa

SEQ ID NO: 138 - DNA, 22 bp, Homo sapiens
gcccggtggtgtggggctccca

SEQ ID NO: 139 - DNA, 18 bp, Homo sapiens
gcctaggaggaacctgaa

SEQ ID NO: 140 - DNA, 88 bp, Equine herpesvirus 2
ttcataaaccctcgctcaccatctatcaaaaaacaagcaaaagtttcagctcactttaacttgttgcctcagctaaaggttttgtgga

SEQ ID NO: 141 - DNA, 24 bp, Equine herpesvirus 2
taacttgttgcctcagctaaaggt

SEQ ID NO: 142 - DNA, 24 bp, Equine herpesvirus 2
accctcgctcaccatctatcaaaa

SEQ ID NO: 143 - DNA, 15 bp, Homo sapiens
aacttgttgtcagag

SEQ ID NO: 144 - DNA, 19 bp, Homo sapiens
gctcctcttggctaaaggt

SEQ ID NO: 145 - DNA, 21 bp, Homo sapiens
caacttgttgtctcagtatag

SEQ ID NO: 146 - DNA, 26 bp, Homo sapiens
taatttgttaccttagagctttgggt

SEQ ID NO: 147 - DNA, 22 bp, Homo sapiens
taacttgctgccagttagaggt

SEQ ID NO: 148 - DNA, 19 bp, Homo sapiens
taacttgtagcctcagtaa

SEQ ID NO: 149 - DNA, 18 bp, Homo sapiens
taacttgttgcagaaagg

SEQ ID NO: 150 - DNA, 18 bp, Homo sapiens
taacttgttgattcagct

SEQ ID NO: 151 - DNA, 18 bp, Homo sapiens
acccttctctgtatcaaa

SEQ ID NO: 152 - DNA, 16 bp, Homo sapiens
accccgcctctatcaa

SEQ ID NO: 153 - DNA, 22 bp, Homo sapiens
accctttttatcattctatcaa

SEQ ID NO: 154 - DNA, 21 bp, Homo sapiens
ctctgctcactggtatcaaaa

SEQ ID NO: 155 - DNA, 19 bp, Homo sapiens
cctctcttatctatcaaaa

SEQ ID NO: 156 - DNA, 20 bp, Homo sapiens
actcagcattatctatcaaa

SEQ ID NO: 157 - DNA, 19 bp, Homo sapiens
accctcgctgtttctacaa

SEQ ID NO: 158 - DNA, 20 bp, Homo sapiens
cccgctcactaagagcatca

SEQ ID NO: 159 - DNA, 60 bp, Equine herpesvirus 2
gttaaataaaaatataaatgttatatgttaaaatgtgaaattatatatcatttgtttaat

SEQ ID NO: 160 - DNA, 24 bp, Equine herpesvirus 2
tgaaattatatatcatttgtttaa

SEQ ID NO: 161 - DNA, 24 bp, Equine herpesvirus 2
taaataaaaatataaatgttatat

SEQ ID NO: 162 - DNA, 19 bp, Homo sapiens
aaattatatatcatttatt

SEQ ID NO: 163 - DNA, 18 bp, Homo sapiens
aaataaaaatataaatat

SEQ ID NO: 164 - DNA, 84 bp, Equine herpesvirus 2
gcagatcttatgcttgtcagttaaagcccggaatgtttttttttaattaacaattcctgctgtaactgacacaacaaaatctgc

SEQ ID NO: 165 - DNA, 24 bp, Equine herpesvirus 2
ttaaagcccggaatgttttttttt

SEQ ID NO: 166 - DNA, 24 bp, Equine herpesvirus 2
tgtaactgacacaacaaaatctgc

SEQ ID NO: 167 - DNA, 24 bp, Homo sapiens
ttaaagcttggctggctttttttt

SEQ ID NO: 168 - DNA, 20 bp, Homo sapiens
ttaaagttttggaatgtttt

SEQ ID NO: 169 - DNA, 21 bp, Homo sapiens
tcaaagcctggagatgttttt

SEQ ID NO: 170 - DNA, 18 bp, Homo sapiens
taattgacacaacaaaat

SEQ ID NO: 171 - DNA, 23 bp, Homo sapiens
tgagctgacacaacacatctctg

SEQ ID NO: 172 - DNA, 18 bp, Homo sapiens
tgacggaaacgaaatctg

SEQ ID NO: 173 - DNA, 18 bp, Homo sapiens
tgtaactgatattacaac

SEQ ID NO: 174 - DNA, 70 bp, Equine herpesvirus 2
gtagctagggtggtgagtggcgctcgcagcagctagtgagctgctgagcaacactccctgccccagctac

SEQ ID NO: 175 - DNA, 24 bp, Equine herpesvirus 2
tggtgagtggcgctcgcagcagct

SEQ ID NO: 176 - DNA, 24 bp, Equine herpesvirus 2
tgctgagcaacactccctgcccca

SEQ ID NO: 177 - DNA, 20 bp, Homo sapiens
tggtgggtggcgcagcagct

SEQ ID NO: 178 - DNA, 20 bp, Homo sapiens
ggtgagtgtgtgcagcagct

SEQ ID NO: 179 - DNA, 20 bp, Homo sapiens
ctgagcaacggctgctgccc

SEQ ID NO: 180 - DNA, 18 bp, Homo sapiens
tgctgagcaaagctggct

SEQ ID NO: 181 - DNA, 18 bp, Homo sapiens
gctcacattccctgcccc

SEQ ID NO: 182 - DNA, 20 bp, Homo sapiens
ctgggcaggtgactgcccca

SEQ ID NO: 183 - DNA, 22 bp, Homo sapiens
tgctgagcagtcccggctccca

SEQ ID NO: 184 - DNA, 17 bp, Homo sapiens
gctgagcaaagcctgcc

SEQ ID NO: 185 - DNA, 19 bp, Homo sapiens
tgttgagtggccctgcccc

SEQ ID NO: 186 - DNA, 23 bp, Homo sapiens
tgctgagcagcaagaagctgccc

SEQ ID NO: 187 - DNA, 19 bp, Homo sapiens
ctgggcccacccctgcccc

SEQ ID NO: 188 - DNA, 19 bp, Homo sapiens
tgctgagccgacacatccc

SEQ ID NO: 189 - DNA, 18 bp, Homo sapiens
tgcgtgagcgcctgcccc

SEQ ID NO: 190 - DNA, 18 bp, Homo sapiens
tgctgaacgttctctgcc

SEQ ID NO: 191 - DNA, 20 bp, Homo sapiens
tactgagcggtgtccactcc

SEQ ID NO: 192 - DNA, 21 bp, Homo sapiens
tacaaagtatttcctgcccca

SEQ ID NO: 193 - DNA, 20 bp, Homo sapiens
tggtgagctctccctgctcc

SEQ ID NO: 194 - DNA, 16 bp, Homo sapiens
tgctgagccacatgcc

SEQ ID NO: 195 - DNA, 23 bp, Homo sapiens
tgctgagcaatatttacatctcc

SEQ ID NO: 196 - DNA, 83 bp, Equine herpesvirus 2
gggtgtggtccggaccgctgcggtagttgccctcgcagatctgggtctcccaggcgactacctcctgcggggggatcatgtcc

SEQ ID NO: 197 - DNA, 24 bp, Equine herpesvirus 2
tcccaggcgactacctcctgcggg

SEQ ID NO: 198 - DNA, 24 bp, Equine herpesvirus 2
cggtagttgccctcgcagatctgg

SEQ ID NO: 199 - DNA, 18 bp, Homo sapiens
tctcaggcgactgccgcg

SEQ ID NO: 200 - DNA, 23 bp, Homo sapiens
tcctgggcactgcttctcccggg

SEQ ID NO: 201 - DNA, 19 bp, Homo sapiens
tccaaggtgggccctgcgg

SEQ ID NO: 202 - DNA, 18 bp, Homo sapiens
agctcggcctcctgcggg

SEQ ID NO: 203 - DNA, 21 bp, Homo sapiens
tcccaggcactgtcacgtggg

SEQ ID NO: 204 - DNA, 19 bp, Homo sapiens
ggcatagacctcctgtggg

SEQ ID NO: 205 - DNA, 18 bp, Homo sapiens
gtagttgcccttgtcaga

SEQ ID NO: 206 - DNA, 19 bp, Homo sapiens
cggtgttgctctagatctg

SEQ ID NO: 207 - DNA, 23 bp, Homo sapiens
cggcagttgtccctgaggtctgg

SEQ ID NO: 208 - DNA, 20 bp, Homo sapiens
ggtggtgccctcacatctgg

SEQ ID NO: 209 - DNA, 97 bp, Equine herpesvirus 2
gcgcaaaagacccctagggagaggaggtaagctaggtgtgtgtttaataaccatcacctgtttatagtctctaaccaggatatattcatttttaagc

SEQ ID NO: 210 - DNA, 24 bp, Equine herpesvirus 2
tttatagtctctaaccaggatata

SEQ ID NO: 211 - DNA, 24 bp, Equine herpesvirus 2
aggtaagctaggtgtgtgtttaat

SEQ ID NO: 212 - DNA, 17 bp, Homo sapiens
tttacagttctcacagg

SEQ ID NO: 213 - DNA, 19 bp, Homo sapiens
tagcaacctgcaggatata

SEQ ID NO: 214 - DNA, 20 bp, Homo sapiens
ggggagtctaagatgtgttt

SEQ ID NO: 215 - DNA, 18 bp, Homo sapiens
agggggccatgtgtttaa

SEQ ID NO: 216 - DNA, 18 bp, Homo sapiens
aggagggctgggtgtgtg

SEQ ID NO: 217 - DNA, 64 bp, Equine herpesvirus 2
tcgtgaattttgattttttaaaaccattaactaatttaaaaagtttaattattccaaataatga

SEQ ID NO: 218 - DNA, 24 bp, Equine herpesvirus 2
taaaaagtttaattattccaaata

SEQ ID NO: 219 - DNA, 24 bp, Equine herpesvirus 2
gtgaattttgattttttaaaacca

SEQ ID NO: 220 - DNA, 19 bp, Homo sapiens
aaaattattattccaaata

SEQ ID NO: 221 - DNA, 25 bp, Homo sapiens
gtgaattttaattgtagtgaaacca

SEQ ID NO: 222 - DNA, 19 bp, Homo sapiens
gtgaattttcattttaacc

SEQ ID NO: 223 - DNA, 24 bp, Homo sapiens
gtcaattttgaatctttgaaacca

SEQ ID NO: 224 - DNA, 21 bp, Homo sapiens
gtgattgtgcttttaaaacca

SEQ ID NO: 225 - DNA, 92 bp, Equine herpesvirus 2
aggtgagctccacgtaggatagcttaagatacaatctcagtttatacaacactacagagagcaccttaagctatcatacctaaaacacacct

SEQ ID NO: 226 - DNA, 24 bp, Equine herpesvirus 2
agagagcaccttaagctatcatac

SEQ ID NO: 227 - DNA, 24 bp, Equine herpesvirus 2
tagcttaagatacaatctcagttt

SEQ ID NO: 228 - DNA, 22 bp, Homo sapiens
agggagcaccctgagcttgcat

SEQ ID NO: 229 - DNA, 22 bp, Homo sapiens
aagagcactttaattcacatac

SEQ ID NO: 230 - DNA, 18 bp, Homo sapiens
cagcttccaatctcagtt

SEQ ID NO: 231 - DNA, 19 bp, Homo sapiens
gcttgagatacaaacgttt

SEQ ID NO: 232 - DNA, 24 bp, Homo sapiens
tagctatagacaacatctcagttt

SEQ ID NO: 233 - DNA, 65 bp, Equine herpesvirus 2
ttgctcaacattttaattttatctttaatgttaacattttaaactgcagttaaaagttttagtaa

SEQ ID NO: 234 - DNA, 24 bp, Equine herpesvirus 2
tttaattttatctttaatgttaac

SEQ ID NO: 235 - DNA, 24 bp, Equine herpesvirus 2
tttaaactgcagttaaaagtttta

SEQ ID NO: 236 - DNA, 21 bp, Homo sapiens
tttatactgcagttgaaaaat

SEQ ID NO: 237 - DNA, 21 bp, Homo sapiens
ttagactgcagttattatctt

SEQ ID NO: 238 - DNA, 18 bp, Homo sapiens
tttaaactcgcagttaaa

SEQ ID NO: 239 - DNA, 65 bp, Equine herpesvirus 2
agagggcgttggagagaagcttggcgatgctgcggagcgtttggtttctgtcccggtcggccttt

SEQ ID NO: 240 - DNA, 24 bp, Equine herpesvirus 2
tggagagaagcttggcgatgctgc

SEQ ID NO: 241 - DNA, 24 bp, Equine herpesvirus 2
ttggtttctgtcccggtcggcctt

SEQ ID NO: 242 - DNA, 19 bp, Homo sapiens
tggagggaagcttgggctg

SEQ ID NO: 243 - DNA, 19 bp, Homo sapiens
tggggagaaacaaatgctg

SEQ ID NO: 244 - DNA, 23 bp, Homo sapiens
tgggcagaggccagggatgctgc

SEQ ID NO: 245 - DNA, 17 bp, Homo sapiens
tggggaggacgctgctg

SEQ ID NO: 246 - DNA, 23 bp, Homo sapiens
tggggagaaggtagagatgctgc

SEQ ID NO: 247 - DNA, 19 bp, Homo sapiens
tggagtggaggggatgctg

SEQ ID NO: 248 - DNA, 20 bp, Homo sapiens
tggggaggactcacttgctg

SEQ ID NO: 249 - DNA, 18 bp, Homo sapiens
tggagagagccagtgctg

SEQ ID NO: 250 - DNA, 22 bp, Homo sapiens
tggagggtggagatgatgctgc

SEQ ID NO: 251 - DNA, 21 bp, Homo sapiens
ggggagaaggagggatgctgc

SEQ ID NO: 252 - DNA, 19 bp, Homo sapiens
tggagagaggcctgggtgc

SEQ ID NO: 253 - DNA, 22 bp, Homo sapiens
tgggcagaagtcgtggtgttgc

SEQ ID NO: 254 - DNA, 28 bp, Homo sapiens
ttggttcctgttttttttaaggccgacc

SEQ ID NO: 255 - DNA, 18 bp, Homo sapiens
ttggtttcttttcctcct

SEQ ID NO: 256 - DNA, 23 bp, Homo sapiens
ttcgtttctgtccttttctgggc

SEQ ID NO: 257 - DNA, 16 bp, Homo sapiens
ggtttctgtttggcct

SEQ ID NO: 258 - DNA, 20 bp, Homo sapiens
ttgttttctgtctcggtaac

SEQ ID NO: 259 - DNA, 19 bp, Homo sapiens
tggtttctgtcctgaatga

SEQ ID NO: 260 - DNA, 97 bp, Equine herpesvirus 2
ccattaaataaattaaaaaaattggaaatattggaatgtaatcattttaatatagaaaaacatacattaccaaattcaattactagtttatcattgg

SEQ ID NO: 261 - DNA, 24 bp, Equine herpesvirus 2
taaattaaaaaaattggaaatatt

SEQ ID NO: 262 - DNA, 24 bp, Equine herpesvirus 2
aaaacatacattaccaaattcaat

SEQ ID NO: 263 - DNA, 21 bp, Homo sapiens
atgaaaaaaattggaagtatt

SEQ ID NO: 264 - DNA, 20 bp, Homo sapiens
ttaaaaaaatagaaaatatt

SEQ ID NO: 265 - DNA, 21 bp, Homo sapiens
acatagcatttcaaattcaat

SEQ ID NO: 266 - DNA, 21 bp, Homo sapiens
catacaagatacaaattcaat

SEQ ID NO: 267 - DNA, 22 bp, Homo sapiens
ggaacaacattcccaattcaat

SEQ ID NO: 268 - DNA, 20 bp, Homo sapiens
acataccacacaaattcaat

SEQ ID NO: 269 - DNA, 19 bp, Homo sapiens
aaaacatacattttcccaa

SEQ ID NO: 270 - DNA, 22 bp, Homo sapiens
aaaacatctgttcaaattcaat

SEQ ID NO: 271 - DNA, 104 bp, Equine herpesvirus 2
ggtgagaaaggcttttcacgcatacttgcactgtcagcagttattgtattcctaacaccaacacataactactgatggtgctcaacatgcgtgcgccaaacacc

SEQ ID NO: 272 - DNA, 24 bp, Equine herpesvirus 2
atggtgctcaacatgcgtgcgcca

SEQ ID NO: 273 - DNA, 24 bp, Equine herpesvirus 2
cttttcacgcatacttgcactgtc

SEQ ID NO: 274 - DNA, 21 bp, Homo sapiens
cggtgctcagtgcccggcgcc

SEQ ID NO: 275 - DNA, 17 bp, Homo sapiens
tggagctcggcgtgcgc

SEQ ID NO: 276 - DNA, 22 bp, Homo sapiens
tggtgttacggtgagcacgcca

SEQ ID NO: 277 - DNA, 20 bp, Homo sapiens
tggtgctctggccccgcgcc

SEQ ID NO: 278 - DNA, 20 bp, Homo sapiens
gtgctcagcgtacacagcca

SEQ ID NO: 279 - DNA, 20 bp, Homo sapiens
atggtgctcagtgagcgccc

SEQ ID NO: 280 - DNA, 19 bp, Homo sapiens
atggtgctggttgtgcgcc

SEQ ID NO: 281 - DNA, 16 bp, Homo sapiens
ggtgctcagtaagtgc

SEQ ID NO: 282 - DNA, 17 bp, Homo sapiens
ttttcacgttgcacggt

SEQ ID NO: 283 - DNA, 129 bp, Equine herpesvirus 2
gaaactttaaaatttatattcatgtaaagttttaagcttacaaaattaaatcagggcttcaaaaaagattgtttttctagtatatgttttgtagatgttttaagcttacagattttaaattagggcttc

SEQ ID NO: 284 - DNA, 24 bp, Equine herpesvirus 2
ttcatgtaaagttttaagcttaca

SEQ ID NO: 285 - DNA, 23 bp, Equine herpesvirus 2
tacagattttaaattagggcttc

SEQ ID NO: 286 - DNA, 18 bp, Homo sapiens
ttctgtaaagttctttgc

SEQ ID NO: 287 - DNA, 17 bp, Homo sapiens
ttctgtatcttaagctt

SEQ ID NO: 288 - DNA, 14 bp, Homo sapiens
tacagattttaact

SEQ ID NO: 289 - DNA, 16 bp, Homo sapiens
cagattttatcagctt

SEQ ID NO: 290 - DNA, 15 bp, Homo sapiens
cagattctagagctt

SEQ ID NO: 291 - DNA, 22 bp, Homo sapiens
tacaaattttaaatctcaactt

SEQ ID NO: 292 - DNA, 15 bp, Homo sapiens
tacagatttaaagct

SEQ ID NO: 293 - DNA, 18 bp, Homo sapiens
tacagatttgaaattaag

SEQ ID NO: 294 - DNA, 15 bp, Homo sapiens
cacagattttaagct

SEQ ID NO: 295 - DNA, 21 bp, Homo sapiens
tacaaattttaaatgtagccc

SEQ ID NO: 296 - DNA, 19 bp, Homo sapiens
tacaataaacttagggctt

SEQ ID NO: 297 - DNA, 18 bp, Homo sapiens
agatttacttagggcttc

SEQ ID NO: 298 - DNA, 18 bp, Homo sapiens
cagatctttaaacaaagg

SEQ ID NO: 299 - DNA, 130 bp, Equine herpesvirus 2
tgcagcagatgtgccacgggcacgtcccggtcggcgtccaggtgggtgcgaccgtagccccgcagggggcgcagcagcgccaggtcggccaccacgcgctcggccaggatggcctgctgcatgcgctgca

SEQ ID NO: 300 - DNA, 24 bp, Equine herpesvirus 2
aggtgggtgcgaccgtagccccgc

SEQ ID NO: 301 - DNA, 24 bp, Equine herpesvirus 2
tcggccaccacgcgctcggccagg

SEQ ID NO: 302 - DNA, 21 bp, Homo sapiens
gtgggtgacacgtggccccgc

SEQ ID NO: 303 - DNA, 17 bp, Homo sapiens
ggtgggtggactgtgac

SEQ ID NO: 304 - DNA, 16 bp, Homo sapiens
aggtgggtgcagaagc

SEQ ID NO: 305 - DNA, 21 bp, Homo sapiens
agctgggtgcgggcttcctgc

SEQ ID NO: 306 - DNA, 20 bp, Homo sapiens
ggtgggtgtggtctgtcccg

SEQ ID NO: 307 - DNA, 19 bp, Homo sapiens
gtgggtgcggcgccctcgc

SEQ ID NO: 308 - DNA, 18 bp, Homo sapiens
agtgccgactgtggcccg

SEQ ID NO: 309 - DNA, 19 bp, Homo sapiens
ggtgagtgtggctgccacg

SEQ ID NO: 310 - DNA, 20 bp, Homo sapiens
ggtgggtgtgggctgcccgc

SEQ ID NO: 311 - DNA, 21 bp, Homo sapiens
aggtgggtggcgggtccctgc

SEQ ID NO: 312 - DNA, 16 bp, Homo sapiens
gtgggtgcgcgccccg

SEQ ID NO: 313 - DNA, 20 bp, Homo sapiens
gggggtggccatagccctgc

SEQ ID NO: 314 - DNA, 18 bp, Homo sapiens
tcggcccatcatgcccag

SEQ ID NO: 315 - DNA, 22 bp, Homo sapiens
tcggccacggctccaggctggg

SEQ ID NO: 316 - DNA, 23 bp, Homo sapiens
tcggccggcgcgcggggctgcgg

SEQ ID NO: 317 - DNA, 21 bp, Homo sapiens
tccgcgctgcgctcggctggg

SEQ ID NO: 318 - DNA, 18 bp, Homo sapiens
tcggccgccgctcggcag

SEQ ID NO: 319 - DNA, 22 bp, Homo sapiens
tcggccactgcgggagggcagg

SEQ ID NO: 320 - DNA, 20 bp, Homo sapiens
tcggccgtcacagcgccggc

SEQ ID NO: 321 - DNA, 23 bp, Homo sapiens
cggccatggcccgctcggccggg

SEQ ID NO: 322 - DNA, 23 bp, Homo sapiens
tcggcactgcgctgagacccagg

SEQ ID NO: 323 - DNA, 19 bp, Homo sapiens
ccggccccgctcggctagg

SEQ ID NO: 324 - DNA, 22 bp, Homo sapiens
tcggccgctgctcgctgcccgg

SEQ ID NO: 325 - DNA, 22 bp, Homo sapiens
gcccgctgcgcgctcggctggg

SEQ ID NO: 326 - DNA, 16 bp, Homo sapiens
ggctgctctcggccag

SEQ ID NO: 327 - DNA, 21 bp, Homo sapiens
tcggcccctaaattggccagg

SEQ ID NO: 328 - DNA, 17 bp, Homo sapiens
ccggccaccgcggccgg

SEQ ID NO: 329 - DNA, 24 bp, Homo sapiens
tcggccgtgcgcgcgtgggctggg

SEQ ID NO: 330 - DNA, 23 bp, Homo sapiens
tcggccagtgctcagtggccagg

SEQ ID NO: 331 - DNA, 84 bp, Equine herpesvirus 2
ctgtcactcatgccagtacactcgcacccgtagtgtttatacataaactacgggggaagcttgtgtactggatatgagtgacag

SEQ ID NO: 332 - DNA, 24 bp, Equine herpesvirus 2
tcactcatgccagtacactcgcac

SEQ ID NO: 333 - DNA, 19 bp, Equine herpesvirus 2
tactggatatgagtgacag

SEQ ID NO: 334 - DNA, 21 bp, Homo sapiens
tcctcatgcctgtctttgtac

SEQ ID NO: 335 - DNA, 24 bp, Homo sapiens
tcactcgcgcacagacactcgcac

SEQ ID NO: 336 - DNA, 21 bp, Homo sapiens
tcactcatgatgagcttgtac

SEQ ID NO: 337 - DNA, 18 bp, Homo sapiens
ctctcgagatacactcgc

SEQ ID NO: 338 - DNA, 18 bp, Homo sapiens
cacttatgttggtacact

SEQ ID NO: 339 - DNA, 22 bp, Homo sapiens
tcacgcacgcgtgcactcgcac

SEQ ID NO: 340 - DNA, 17 bp, Homo sapiens
tactagatggaatacag

SEQ ID NO: 341 - DNA, 14 bp, Homo sapiens
tactagatgagaca

SEQ ID NO: 342 - DNA, 14 bp, Homo sapiens
tactggacagtgca

SEQ ID NO: 343 - DNA, 19 bp, Homo sapiens
tactacaaatgagtgacag

SEQ ID NO: 344 - DNA, 19 bp, Homo sapiens
tactggatttaaagtgcag

SEQ ID NO: 345 - DNA, 16 bp, Homo sapiens
cactggatagacacag

SEQ ID NO: 346 - DNA, 19 bp, Homo sapiens
tacaggtaataagtgacag

SEQ ID NO: 347 - DNA, 16 bp, Homo sapiens
tactggtaaacaacag

SEQ ID NO: 348 - DNA, 18 bp, Homo sapiens
tggatatgtgtgtggcag

SEQ ID NO: 349 - DNA, 21 bp, Homo sapiens
tactggatagttttcaaacag

SEQ ID NO: 350 - DNA, 19 bp, Homo sapiens
cactggacccatgtggcag

SEQ ID NO: 351 - DNA, 17 bp, Homo sapiens
tactggtttaatgacag

SEQ ID NO: 352 - DNA, 16 bp, Homo sapiens
actggatacattacag

SEQ ID NO: 353 - DNA, 18 bp, Homo sapiens
tactgagataaataacag

SEQ ID NO: 354 - DNA, 21 bp, Homo sapiens
tactggatatattctttacag

SEQ ID NO: 355 - DNA, 18 bp, Homo sapiens
tacttccttgagtgacag

SEQ ID NO: 356 - DNA, 73 bp, Equine herpesvirus 2
cgcgcatgagcatgccctgtatgcctcaagtttcatagagtatgtaggtgatccatgggcagtgcgcatgccg

SEQ ID NO: 357 - DNA, 22 bp, Equine herpesvirus 2
tccatgggcagtgcgcatgccg

SEQ ID NO: 358 - DNA, 24 bp, Equine herpesvirus 2
gccctgtatgcctcaagtttcata

SEQ ID NO: 359 - DNA, 17 bp, Homo sapiens
ccatgggcagtgggttg

SEQ ID NO: 360 - DNA, 16 bp, Homo sapiens
caagggcagtggcccc

SEQ ID NO: 361 - DNA, 17 bp, Homo sapiens
ccatgggcgccgccatg

SEQ ID NO: 362 - DNA, 17 bp, Homo sapiens
tcctatctgtgcatgcc

SEQ ID NO: 363 - DNA, 18 bp, Homo sapiens
tccatgggcagatggaac

SEQ ID NO: 364 - DNA, 17 bp, Homo sapiens
tcctggcgagcgcatgc

SEQ ID NO: 365 - DNA, 14 bp, Homo sapiens
tccagggcagtggc

SEQ ID NO: 366 - DNA, 19 bp, Homo sapiens
tctgtgagcagttggcttg

SEQ ID NO: 367 - DNA, 18 bp, Homo sapiens
tccatgggggctgaatgc

SEQ ID NO: 368 - DNA, 16 bp, Homo sapiens
tccatggggtacatgc

SEQ ID NO: 369 - DNA, 21 bp, Homo sapiens
gcctagtatgtatatttcata

SEQ ID NO: 370 - DNA, 19 bp, Homo sapiens
gccctctgtgcttcaagtc

SEQ ID NO: 371 - DNA, 21 bp, Homo sapiens
cctgtaagtttccatttcata

SEQ ID NO: 372 - DNA, 19 bp, Homo sapiens
gccctgtagcctcttccat

SEQ ID NO: 373 - DNA, 22 bp, Homo sapiens
accctgtgaggtgggtttcata

SEQ ID NO: 374 - DNA, 20 bp, Homo sapiens
ctgtatggttaagtttcata

SEQ ID NO: 375 - DNA, 75 bp, Equine herpesvirus 2
gtgtctagtgacagacagggagtggattgcgctccttaaactcccgcacccgctcactgtctgtctacagactac

SEQ ID NO: 376 - DNA, 24 bp, Equine herpesvirus 2
cacccgctcactgtctgtctacag

SEQ ID NO: 377 - DNA, 24 bp, Equine herpesvirus 2
tgacagacagggagtggattgcgc

SEQ ID NO: 378 - DNA, 21 bp, Homo sapiens
cgctcactggagatcctgcag

SEQ ID NO: 379 - DNA, 15 bp, Homo sapiens
gctctctgtctacag

SEQ ID NO: 380 - DNA, 18 bp, Homo sapiens
gctcactgtattcctcag

SEQ ID NO: 381 - DNA, 17 bp, Homo sapiens
cctttcactgtcttcta

SEQ ID NO: 382 - DNA, 23 bp, Homo sapiens
ccagaattattgtctgtctgcag

SEQ ID NO: 383 - DNA, 21 bp, Homo sapiens
cccctcagagcctgtctgcag

SEQ ID NO: 384 - DNA, 18 bp, Homo sapiens
gcttgtctgtcaggccag

SEQ ID NO: 385 - DNA, 19 bp, Homo sapiens
ctcttgctgttatctacag

SEQ ID NO: 386 - DNA, 26 bp, Homo sapiens
cccgcccgctgctatggctgtagaca

SEQ ID NO: 387 - DNA, 20 bp, Homo sapiens
cacccgttcctgcgctctac

SEQ ID NO: 388 - DNA, 20 bp, Homo sapiens
cccttgaggtctgtctgcag

SEQ ID NO: 389 - DNA, 25 bp, Homo sapiens
cctttgctcactacagctgtagaca

SEQ ID NO: 390 - DNA, 22 bp, Homo sapiens
caccctcttcagatgtctacag

SEQ ID NO: 391 - DNA, 17 bp, Homo sapiens
cctgctcctgccttaca

SEQ ID NO: 392 - DNA, 18 bp, Homo sapiens
ccacttgcgcatctacag

SEQ ID NO: 393 - DNA, 23 bp, Homo sapiens
gctcttcacagagatgtctacag

SEQ ID NO: 394 - DNA, 19 bp, Homo sapiens
cacccgccagctggtctgc

SEQ ID NO: 395 - DNA, 24 bp, Homo sapiens
tgagggacagggacaccctttgcg

SEQ ID NO: 396 - DNA, 21 bp, Homo sapiens
acagatgggaaaatattgtgc

SEQ ID NO: 397 - DNA, 18 bp, Homo sapiens
gacagggagggggtctgc

SEQ ID NO: 398 - DNA, 22 bp, Homo sapiens
tgacagatcagggagcagggtg

SEQ ID NO: 399 - DNA, 22 bp, Homo sapiens
tgataaacaggggcatttgtgc

SEQ ID NO: 400 - DNA, 15 bp, Homo sapiens
aggcagggagtgggc

SEQ ID NO: 401 - DNA, 73 bp, Equine herpesvirus 2
gtaataagttaaataaaaatataaatgttatatgttaaaatgtgaaattatatatcatttgtttaataattac

SEQ ID NO: 402 - DNA, 24 bp, Equine herpesvirus 2
taagttaaataaaaatataaatgt

SEQ ID NO: 403 - DNA, 114 bp, Equine herpesvirus 2
ctgagaagtcatccaggtccaggaaccggtggtaggcgcccgtgttgatggtgtaggagcagttgcccagcacggaccagttgaccacctggtagtggggctggatgacctcgg

SEQ ID NO: 404 - DNA, 24 bp, Equine herpesvirus 2
tccaggaaccggtggtaggcgccc

SEQ ID NO: 405 - DNA, 24 bp, Equine herpesvirus 2
ccagcacggaccagttgaccacct

SEQ ID NO: 406 - DNA, 21 bp, Homo sapiens
ccgggcgtggtggtaggtgcc

SEQ ID NO: 407 - DNA, 19 bp, Homo sapiens
gggcatggtggtaggcgcc

SEQ ID NO: 408 - DNA, 19 bp, Homo sapiens
gggcaaggtggtaggtgcc

SEQ ID NO: 409 - DNA, 19 bp, Homo sapiens
ggccctggtggtaggtgcc

SEQ ID NO: 410 - DNA, 18 bp, Homo sapiens
cctggggatgtaggcgcc

SEQ ID NO: 411 - DNA, 18 bp, Homo sapiens
ggacgcctggaggcgccc

SEQ ID NO: 412 - DNA, 16 bp, Homo sapiens
tccgggaccagggcgc

SEQ ID NO: 413 - DNA, 16 bp, Homo sapiens
tccaggaatggtggcg

SEQ ID NO: 414 - DNA, 17 bp, Homo sapiens
ggaaccgatggccgccc

SEQ ID NO: 415 - DNA, 22 bp, Homo sapiens
cccaggggctggagaggcgccc

SEQ ID NO: 416 - DNA, 21 bp, Homo sapiens
ccgggcatagtggtgggtgcc

SEQ ID NO: 417 - DNA, 22 bp, Homo sapiens
ccgggagccggcggtggcgccc

SEQ ID NO: 418 - DNA, 19 bp, Homo sapiens
tccagggaggtgtaggcgc

SEQ ID NO: 419 - DNA, 30 bp, Homo sapiens
tccaggaatctgggctcaagtgggtgtccg

SEQ ID NO: 420 - DNA, 20 bp, Homo sapiens
tccagaaactggggctgtgc

SEQ ID NO: 421 - DNA, 18 bp, Homo sapiens
ggctgggggcaggcgtcc

SEQ ID NO: 422 - DNA, 17 bp, Homo sapiens
tctgggaacgcaggcgc

SEQ ID NO: 423 - DNA, 21 bp, Homo sapiens
tccagggactgggctcagccc

SEQ ID NO: 424 - DNA, 25 bp, Homo sapiens
ccagttggactgtaacttgtcacct

SEQ ID NO: 425 - DNA, 19 bp, Homo sapiens
ccagcaggccttggccgcc

SEQ ID NO: 426 - DNA, 22 bp, Homo sapiens
cagagcggatggaagaccacct

SEQ ID NO: 427 - DNA, 22 bp, Homo sapiens
ccacatggaccaaccctcacct

SEQ ID NO: 428 - DNA, 19 bp, Homo sapiens
cagcacgggtaccgtcgcc

SEQ ID NO: 429 - DNA, 25 bp, Homo sapiens
ccagcacaggcaagatttggctgcc

SEQ ID NO: 430 - DNA, 20 bp, Homo sapiens
ccagcacagacatggaccac

SEQ ID NO: 431 - DNA, 24 bp, Homo sapiens
ccgcacggaccgtgcctgccgcct

SEQ ID NO: 432 - DNA, 16 bp, Homo sapiens
ccagcacggtcctcac

SEQ ID NO: 433 - DNA, 21 bp, Homo sapiens
ccagcgtgaccagctccacct

SEQ ID NO: 434 - DNA, 19 bp, Homo sapiens
ccaacgcgggtggatcacc

SEQ ID NO: 435 - DNA, 24 bp, Homo sapiens
ccagcatggataaattaaccacct

SEQ ID NO: 436 - DNA, 21 bp, Homo sapiens
ccagctgggctgggctcgacc

SEQ ID NO: 437 - DNA, 83 bp, Equine herpesvirus 2
tgtctcttgctaggtagcctgtacaaaacagtccttttttaatgtaaaacagtgttttgtccagactagcctaacacgaacca

SEQ ID NO: 438 - DNA, 24 bp, Equine herpesvirus 2
tctcttgctaggtagcctgtacaa

SEQ ID NO: 439 - DNA, 24 bp, Equine herpesvirus 2
aacagtgttttgtccagactagcc

SEQ ID NO: 440 - DNA, 22 bp, Homo sapiens
tctcttgcggagtatttgtgca

SEQ ID NO: 441 - DNA, 20 bp, Homo sapiens
tctcttgcatttcctgtgca

SEQ ID NO: 442 - DNA, 20 bp, Homo sapiens
tcttttaaaacgctgtacaa

SEQ ID NO: 443 - DNA, 22 bp, Homo sapiens
ccttttgctgggtggcgtccta

SEQ ID NO: 444 - DNA, 15 bp, Homo sapiens
ttgccggctgtacaa

SEQ ID NO: 445 - DNA, 21 bp, Homo sapiens
tctcttttattcccctgtaca

SEQ ID NO: 446 - DNA, 16 bp, Homo sapiens
aacaatgtcagactag

SEQ ID NO: 447 - DNA, 22 bp, Homo sapiens
acagggtttcaccaggttggcc

SEQ ID NO: 448 - DNA, 18 bp, Homo sapiens
cactgtgttgtccaggct

SEQ ID NO: 449 - DNA, 22 bp, Homo sapiens
gtgaggtgggtccggactagcc

SEQ ID NO: 450 - DNA, 17 bp, Homo sapiens
gtttcgccaggctggcc

SEQ ID NO: 451 - DNA, 18 bp, Homo sapiens
cactatattgtccaggct

SEQ ID NO: 452 - DNA, 17 bp, Homo sapiens
accatgttgtccaggct

SEQ ID NO: 453 - DNA, 22 bp, Homo sapiens
acagggttttgccatgttggcc

SEQ ID NO: 454 - DNA, 20 bp, Homo sapiens
gtgttttggatgcactggcc

SEQ ID NO: 455 - DNA, 22 bp, Homo sapiens
acagggttttgccatattggcc

SEQ ID NO: 456 - DNA, 17 bp, Homo sapiens
gttttgccatgttagcc

SEQ ID NO: 457 - DNA, 22 bp, Homo sapiens
aacagtgttctaaaggctggcc

SEQ ID NO: 458 - DNA, 85 bp, Equine herpesvirus 2
tcctgcagcacccccggtcccgcgcgctgaccgcgcagctgctgctgatcgcgcagcactgccgggacgagggcatggtgaagga

SEQ ID NO: 459 - DNA, 24 bp, Equine herpesvirus 2
tcgcgcagcactgccgggacgagg

SEQ ID NO: 460 - DNA, 24 bp, Equine herpesvirus 2
ccccggtcccgcgcgctgaccgcg

SEQ ID NO: 461 - DNA, 25 bp, Homo sapiens
tcacgcaaaagctgccggggtgagg

SEQ ID NO: 462 - DNA, 20 bp, Homo sapiens
ccccggcccgcgtgcgcccg

SEQ ID NO: 463 - DNA, 18 bp, Homo sapiens
cccgggtcccgcgaactg

SEQ ID NO: 464 - DNA, 18 bp, Homo sapiens
ccccggtcccgcggcgac

SEQ ID NO: 465 - DNA, 20 bp, Homo sapiens
cctcggtgccgtgcgccccg

SEQ ID NO: 466 - DNA, 19 bp, Homo sapiens
ccccgctcccgccatgccg

SEQ ID NO: 467 - DNA, 20 bp, Homo sapiens
gtcccgcgcgccgactcgcg

SEQ ID NO: 468 - DNA, 19 bp, Homo sapiens
ccccggccccgcgcgggga

SEQ ID NO: 469 - DNA, 21 bp, Homo sapiens
ccccggcctgcgtgctgggcg

SEQ ID NO: 470 - DNA, 17 bp, Homo sapiens
cagtgcgtgttgaccgc

SEQ ID NO: 471 - DNA, 16 bp, Homo sapiens
cctcggccccgcgccg

SEQ ID NO: 472 - DNA, 18 bp, Homo sapiens
ccccggtgcccatggctg

SEQ ID NO: 473 - DNA, 18 bp, Homo sapiens
cctcggcccgcgcggcgc

SEQ ID NO: 474 - DNA, 20 bp, Homo sapiens
ccccggactcgtgcgagccg

SEQ ID NO: 475 - DNA, 18 bp, Homo sapiens
ccctggccccgcgcgtcg

SEQ ID NO: 476 - DNA, 19 bp, Homo sapiens
ccagctgcgcgttgaccgc

SEQ ID NO: 477 - DNA, 15 bp, Homo sapiens
ccccggcccggaccg

SEQ ID NO: 478 - DNA, 22 bp, Homo sapiens
cctcggtcccgtgcggtccccg

SEQ ID NO: 479 - DNA, 18 bp, Homo sapiens
cccgtcccgcggtgccgc

SEQ ID NO: 480 - DNA, 21 bp, Homo sapiens
cctcgtcccgcgacgcctgcg

SEQ ID NO: 481 - DNA, 17 bp, Homo sapiens
ggtcccgccgcgccgcg

SEQ ID NO: 482 - DNA, 25 bp, Homo sapiens
ccctggcccgcattgtgcgcggtcg

SEQ ID NO: 483 - DNA, 90 bp, Equine herpesvirus 2
ttttgcaagtccctaccaggtagccgtgcataagcttaaaattaataaaaagcttatgcacaagccgtctgattaggaagcactgcaaaa

SEQ ID NO: 484 - DNA, 24 bp, Equine herpesvirus 2
accaggtagccgtgcataagctta

SEQ ID NO: 485 - DNA, 24 bp, Equine herpesvirus 2
tgcacaagccgtctgattaggaag

SEQ ID NO: 486 - DNA, 24 bp, Homo sapiens
ccaggtagccattgaccagggctt

SEQ ID NO: 487 - DNA, 21 bp, Homo sapiens
accagtagcacgatgagctta

SEQ ID NO: 488 - DNA, 19 bp, Homo sapiens
accaagtatgtggtgtaag

SEQ ID NO: 489 - DNA, 23 bp, Homo sapiens
ccaggtagcagatataaagctta

SEQ ID NO: 490 - DNA, 16 bp, Homo sapiens
cagtgtagccaagctt

SEQ ID NO: 491 - DNA, 19 bp, Homo sapiens
tgcggggctgtctgactgg

SEQ ID NO: 492 - DNA, 16 bp, Homo sapiens
tgcagggcaattagga

SEQ ID NO: 493 - DNA, 23 bp, Homo sapiens
tgcagggtccctgggttaggaag

SEQ ID NO: 494 - DNA, 65 bp, Equine herpesvirus 2
gttggtgtgtggtagcgatctatctttctttgtgatcttggtagtgaagcctgccaggctccagc

SEQ ID NO: 495 - DNA, 24 bp, Equine herpesvirus 2
ttggtagtgaagcctgccaggctc

SEQ ID NO: 496 - DNA, 24 bp, Equine herpesvirus 2
tggtagcgatctatctttctttgt

SEQ ID NO: 497 - DNA, 23 bp, Homo sapiens
ctggtagtggaagaccgtgggct

SEQ ID NO: 498 - DNA, 17 bp, Homo sapiens
tggtactctgccaggct

SEQ ID NO: 499 - DNA, 15 bp, Homo sapiens
tggtgtctgtcaggc

SEQ ID NO: 500 - DNA, 23 bp, Homo sapiens
ttagtagtggagtcagctgggct

SEQ ID NO: 501 - DNA, 88 bp, Equine herpesvirus 2
gaggccgttctgaaagagttggatttcagcaccttgggacgcaccgtagctagtgtggctctggtctgcttcatttttgagaagcttc

SEQ ID NO: 502 - DNA, 24 bp, Equine herpesvirus 2
tgaaagagttggatttcagcacct

SEQ ID NO: 503 - DNA, 24 bp, Equine herpesvirus 2
gtggctctggtctgcttcattttt

SEQ ID NO: 504 - DNA, 24 bp, Homo sapiens
gaaagagttgggcatcgcgcatct

SEQ ID NO: 505 - DNA, 21 bp, Homo sapiens
aaggggttggagcccatgcct

SEQ ID NO: 506 - DNA, 22 bp, Homo sapiens
tgaaggcaaaatttcagtgcct

SEQ ID NO: 507 - DNA, 18 bp, Homo sapiens
tgagaggattggatctca

SEQ ID NO: 508 - DNA, 18 bp, Homo sapiens
gagatgaagtcagcacct

SEQ ID NO: 509 - DNA, 18 bp, Homo sapiens
gaaaggcaattttcagca

SEQ ID NO: 510 - DNA, 18 bp, Homo sapiens
agagacggagtttcagca

SEQ ID NO: 511 - DNA, 19 bp, Homo sapiens
tgagtgagttggatttcaa

SEQ ID NO: 512 - DNA, 19 bp, Homo sapiens
tgaaaagttggaaagttgc

SEQ ID NO: 513 - DNA, 20 bp, Homo sapiens
ggggcttctgcttcattttt

SEQ ID NO: 514 - DNA, 18 bp, Homo sapiens
gtggcttctcttcatttt

SEQ ID NO: 515 - DNA, 99 bp, Equine herpesvirus 2
gagtatgtgagttttgtgttgaggcaggccacttgcacttgcattgccttccaaatgcaggtgagagatagcctgctttaacacatatcccacaggttt

SEQ ID NO: 516 - DNA, 24 bp, Equine herpesvirus 2
tagcctgctttaacacatatccca

SEQ ID NO: 517 - DNA, 24 bp, Equine herpesvirus 2
aggcaggccacttgcacttgcatt

SEQ ID NO: 518 - DNA, 18 bp, Homo sapiens
tagcttgctctaagttcc

SEQ ID NO: 519 - DNA, 14 bp, Homo sapiens
gcctgctccatatc

SEQ ID NO: 520 - DNA, 22 bp, Homo sapiens
taccctacccatacatatccca

SEQ ID NO: 521 - DNA, 18 bp, Homo sapiens
tagccaggccacatgtcc

SEQ ID NO: 522 - DNA, 16 bp, Homo sapiens
gcctgttccatatccc

SEQ ID NO: 523 - DNA, 21 bp, Homo sapiens
tagtctgctttattgtgcatc

SEQ ID NO: 524 - DNA, 22 bp, Homo sapiens
aggcagccacttcacctgcatt

SEQ ID NO: 525 - DNA, 65 bp, Equine herpesvirus 2
ggcgggggtgagcgcggcctccctggcgcccgagcgggcgacgcggatgcaggcgctgccctccc

SEQ ID NO: 526 - DNA, 24 bp, Equine herpesvirus 2
cgacgcggatgcaggcgctgccct

SEQ ID NO: 527 - DNA, 24 bp, Equine herpesvirus 2
tgagcgcggcctccctggcgcccg

SEQ ID NO: 528 - DNA, 23 bp, Homo sapiens
cggcgaggcgcgggcgctgctct

SEQ ID NO: 529 - DNA, 26 bp, Homo sapiens
cgcgggcgctgccgggcgctgtccta

SEQ ID NO: 530 - DNA, 16 bp, Homo sapiens
ggacacctgctgccct

SEQ ID NO: 531 - DNA, 21 bp, Homo sapiens
cgacgcggtgtgggcagcagc

SEQ ID NO: 532 - DNA, 20 bp, Homo sapiens
gcggcgggaggcgctgctct

SEQ ID NO: 533 - DNA, 19 bp, Homo sapiens
gcagcctccctgtagaacc

SEQ ID NO: 534 - DNA, 22 bp, Homo sapiens
tgagcgcgcgccacggtgctcg

SEQ ID NO: 535 - DNA, 22 bp, Homo sapiens
tgagcgcggcgtctcacaaccc

SEQ ID NO: 536 - DNA, 14 bp, Homo sapiens
tggcgcggcctcgg

SEQ ID NO: 537 - DNA, 19 bp, Homo sapiens
tgatgacagccctggcgcc

SEQ ID NO: 538 - DNA, 19 bp, Homo sapiens
tgaccgcggggtggcgccc

SEQ ID NO: 539 - DNA, 21 bp, Homo sapiens
tgaccgcggcctctgggcccg

SEQ ID NO: 540 - DNA, 15 bp, Homo sapiens
cgcggcctcccaccc

SEQ ID NO: 541 - DNA, 18 bp, Homo sapiens
tggcgcggcctcctcgcc

SEQ ID NO: 542 - DNA, 17 bp, Homo sapiens
gagcgcggtctccgccc

SEQ ID NO: 543 - DNA, 83 bp, Equine herpesvirus 2
tgccagtctcctaccagagtacttggcaaagatctttttagtacacagagccttcgccaagagctcttagcacgagatgagca

SEQ ID NO: 544 - DNA, 24 bp, Equine herpesvirus 2
accagagtacttggcaaagatctt

SEQ ID NO: 545 - DNA, 23 bp, Equine herpesvirus 2
gagctcttagcacgagatgagca

SEQ ID NO: 546 - DNA, 21 bp, Homo sapiens
accggagtacttagcagcaat

SEQ ID NO: 547 - DNA, 18 bp, Homo sapiens
accaagtaccttagagat

SEQ ID NO: 548 - DNA, 15 bp, Homo sapiens
cagagtaacaaagat

SEQ ID NO: 549 - DNA, 20 bp, Homo sapiens
accagagtacttgtttgcaa

SEQ ID NO: 550 - DNA, 17 bp, Homo sapiens
gagctcttggctggacg

SEQ ID NO: 551 - DNA, 17 bp, Homo sapiens
gagtcttagcatgaggc

SEQ ID NO: 552 - DNA, 17 bp, Homo sapiens
gagctcctcttgagatg

SEQ ID NO: 553 - DNA, 18 bp, Homo sapiens
gagctcctggcgtgagtg

SEQ ID NO: 554 - DNA, 17 bp, Homo sapiens
gagcatcttacccgatg

SEQ ID NO: 555 - DNA, 18 bp, Homo sapiens
gcttctctgagagatgag

SEQ ID NO: 556 - DNA, 21 bp, Homo sapiens
gagctcttcagtgcataggca

SEQ ID NO: 557 - DNA, 21 bp, Homo sapiens
gagctcttagtttcaatggca

SEQ ID NO: 558 - DNA, 18 bp, Homo sapiens
gagctcctggcatgtggc

SEQ ID NO: 559 - DNA, 19 bp, Homo sapiens
gggctgcacggggtgggca

SEQ ID NO: 560 - DNA, 18 bp, Homo sapiens
ggctcagcctgagatgag

SEQ ID NO: 561 - DNA, 15 bp, Homo sapiens
gagttctcagatgag

SEQ ID NO: 562 - DNA, 61 bp, Equine herpesvirus 2
ggtaaggcctgtgagtaagctatctcctcccacagaagcttagtaattcagagcagttatt

SEQ ID NO: 563 - DNA, 18 bp, Equine herpesvirus 2
taattcagagcagttatt

SEQ ID NO: 564 - DNA, 24 bp, Equine herpesvirus 2
taaggcctgtgagtaagctatctc

SEQ ID NO: 565 - DNA, 19 bp, Homo sapiens
tgagccaagtaagctgtct

SEQ ID NO: 566 - DNA, 15 bp, Homo sapiens
ggcctgtgagcatct

SEQ ID NO: 567 - DNA, 22 bp, Homo sapiens
ggaatcttgagtaagttatctc

SEQ ID NO: 568 - DNA, 17 bp, Homo sapiens
ggcttgggaggctgtct

SEQ ID NO: 569 - DNA, 19 bp, Homo sapiens
ggcccttgaaagctatctc

SEQ ID NO: 570 - DNA, 16 bp, Homo sapiens
agggctgcggctatct

SEQ ID NO: 571 - DNA, 22 bp, Homo sapiens
aggccatatctcaggctgtctc

SEQ ID NO: 572 - DNA, 64 bp, Equine herpesvirus 2
tcgcggaggagatgaacgtcagccggagctcctacattgggcacctgctgacactctaccgcga

SEQ ID NO: 573 - DNA, 23 bp, Equine herpesvirus 2
cacctgctgacactctaccgcga

SEQ ID NO: 574 - DNA, 24 bp, Equine herpesvirus 2
tgaacgtcagccggagctcctaca

SEQ ID NO: 575 - DNA, 14 bp, Homo sapiens
gtcaggactcctac

SEQ ID NO: 576 - DNA, 19 bp, Homo sapiens
tgggcgctggccggagccc

SEQ ID NO: 577 - DNA, 130 bp, Equine herpesvirus 2
aagtagtgcgggtaatgaagaagttgcaagtctctcatctgatagcatagtaaaaatcagttcagtatacagattttttctaaactatcgtgacacaagacaagccatcagtacttactcgcacttactt

SEQ ID NO: 578 - DNA, 24 bp, Equine herpesvirus 2
tagcatagtaaaaatcagttcagt

SEQ ID NO: 579 - DNA, 24 bp, Equine herpesvirus 2
tctaaactatcgtgacacaagaca

SEQ ID NO: 580 - DNA, 17 bp, Homo sapiens
tagaaaagtcggttcag

SEQ ID NO: 581 - DNA, 20 bp, Homo sapiens
gccagaaggattagttcagt

SEQ ID NO: 582 - DNA, 21 bp, Homo sapiens
tagtaaagtccacagttcagt

SEQ ID NO: 583 - DNA, 18 bp, Homo sapiens
tagctatagtgaaaatca

SEQ ID NO: 584 - DNA, 19 bp, Homo sapiens
atagtaaaaatatctcagt

SEQ ID NO: 585 - DNA, 24 bp, Homo sapiens
taacatagtaaagtaccttttagt

SEQ ID NO: 586 - DNA, 23 bp, Homo sapiens
tctaaacttcccgtggcataaga

SEQ ID NO: 587 - DNA, 18 bp, Homo sapiens
tctgaacttgaacaagac

SEQ ID NO: 588 - DNA, 18 bp, Homo sapiens
aactacagacacaagaca

SEQ ID NO: 589 - DNA, 20 bp, Homo sapiens
aactgtcccatcacaagaca

SEQ ID NO: 590 - DNA, 17 bp, Homo sapiens
tctgggcatcgtgacac

SEQ ID NO: 591 - DNA, 118 bp, Equine herpesvirus 2
aaattatttataaaatttgaaaagaatgtagaaactataacttagaattaaatattacaatattatataaatatatagatttttatgatcctttatagtataattttgtaaataattt

SEQ ID NO: 592 - DNA, 24 bp, Equine herpesvirus 2
tagaaactataacttagaattaaa

SEQ ID NO: 593 - DNA, 24 bp, Equine herpesvirus 2
ttatataaatatatagatttttat

SEQ ID NO: 594 - DNA, 19 bp, Homo sapiens
cagaaacacttggaattaa

SEQ ID NO: 595 - DNA, 23 bp, Homo sapiens
ttatacaaagagcagatttttat

SEQ ID NO: 596 - DNA, 18 bp, Homo sapiens
ctatatagatatatagat

SEQ ID NO: 597 - DNA, 19 bp, Homo sapiens
ttatataatatagaccttt

SEQ ID NO: 598 - DNA, 121 bp, Equine herpesvirus 2
aacacgtgcccacacttggcaagtctcttgcggaaaagctattttcaaatacattatttaattacaaacgtatttgaaacatagcttttccaacaagcaactagcaatttttgcacctgtt

SEQ ID NO: 599 - DNA, 24 bp, Equine herpesvirus 2
tttgaaacatagcttttccaacaa

SEQ ID NO: 600 - DNA, 24 bp, Equine herpesvirus 2
tggcaagtctcttgcggaaaagct

SEQ ID NO: 601 - DNA, 24 bp, Homo sapiens
tttaaatctatgtttttccaacaa

SEQ ID NO: 602 - DNA, 16 bp, Homo sapiens
tttgaacaattccaac

SEQ ID NO: 603 - DNA, 21 bp, Homo sapiens
tttaaaatatagtttctccaa

SEQ ID NO: 604 - DNA, 16 bp, Homo sapiens
gaaatagcttccaaca

SEQ ID NO: 605 - DNA, 24 bp, Homo sapiens
ttgaaacagatttcttttttaaca

SEQ ID NO: 606 - DNA, 125 bp, Equine herpesvirus 2
aaccatgctgatgaatatgaactcaggagctctcggaaggacactagacccacaggaaaaatatattacaaccggtgaggagtgcctttctcgattgagctactgagtcaaaaaaacgcatggtt

SEQ ID NO: 607 - DNA, 24 bp, Equine herpesvirus 2
tgaggagtgcctttctcgattgag

SEQ ID NO: 608 - DNA, 24 bp, Equine herpesvirus 2
aaggacactagacccacaggaaaa

SEQ ID NO: 609 - DNA, 19 bp, Homo sapiens
gaacactaggccccttcgg

SEQ ID NO: 610 - DNA, 19 bp, Homo sapiens
aaggttgggccacaggaaa

SEQ ID NO: 611 - DNA, 19 bp, Homo sapiens
aagacagaggcccacagga

SEQ ID NO: 612 - DNA, 20 bp, Homo sapiens
aggaacactagatgatgaga

SEQ ID NO: 613 - DNA, 22 bp, Homo sapiens
agcccagagacccacggggaaa

SEQ ID NO: 614 - DNA, 21 bp, Homo sapiens
aagatactggatccacagaaa

SEQ ID NO: 615 - DNA, 16 bp, Homo sapiens
aggagcatccacagga

SEQ ID NO: 616 - DNA, 17 bp, Homo sapiens
agacatcctacaggaaa

SEQ ID NO: 617 - DNA, 28 bp, Homo sapiens
ggacactacaacattgtcatggggaaat

SEQ ID NO: 618 - DNA, 18 bp, Homo sapiens
ggaggcctcacaggaaaa

SEQ ID NO: 619 - DNA, 24 bp, Homo sapiens
aagggcactagaccccggctaagg

SEQ ID NO: 620 - DNA, 18 bp, Homo sapiens
aagggaagccacaggaaa

SEQ ID NO: 621 - DNA, 15 bp, Homo sapiens
ggacacgcacaggaa

SEQ ID NO: 622 - DNA, 24 bp, Homo sapiens
agggggctgagccccgcaggaaaa

SEQ ID NO: 623 - DNA, 18 bp, Homo sapiens
aagaacactagcaggaaa

SEQ ID NO: 624 - DNA, 20 bp, Homo sapiens
aggacactagatccagggaa

SEQ ID NO: 625 - DNA, 21 bp, Homo sapiens
ggcactagactcagcctagaa

SEQ ID NO: 626 - DNA, 21 bp, Homo sapiens
agggtgtcagggtcacaggaa

SEQ ID NO: 627 - DNA, 20 bp, Homo sapiens
aaggtccaaggacccacagg

SEQ ID NO: 628 - DNA, 16 bp, Homo sapiens
aagggcctagcaggaa

SEQ ID NO: 629 - DNA, 21 bp, Homo sapiens
aggacactcggttacatgaaa

SEQ ID NO: 630 - DNA, 22 bp, Homo sapiens
aaggccactaggtgcaggaaaa

SEQ ID NO: 631 - DNA, 20 bp, Homo sapiens
ggatacgggacccacacaga

SEQ ID NO: 632 - DNA, 22 bp, Homo sapiens
agggtagttggaccacagaaaa

SEQ ID NO: 633 - DNA, 17 bp, Homo sapiens
aagaacacccacaggaa

SEQ ID NO: 634 - DNA, 20 bp, Homo sapiens
aggacactgtgctcagagaa

SEQ ID NO: 635 - DNA, 21 bp, Homo sapiens
aaggacactgactaagggaaa

SEQ ID NO: 636 - DNA, 17 bp, Homo sapiens
ggagcagtcccacagga

SEQ ID NO: 637 - DNA, 19 bp, Homo sapiens
aagaatgctgaacaggaaa

SEQ ID NO: 638 - DNA, 15 bp, Homo sapiens
ggcaaaccacaggaa

SEQ ID NO: 639 - DNA, 19 bp, Homo sapiens
ggacactagagcttaggaa

SEQ ID NO: 640 - DNA, 18 bp, Homo sapiens
aaggacactgattgggaa

SEQ ID NO: 641 - DNA, 21 bp, Homo sapiens
aagaacactgggtcctcggaa

SEQ ID NO: 642 - DNA, 21 bp, Homo sapiens
ggagaaatatccacaggaaaa

SEQ ID NO: 643 - DNA, 22 bp, Homo sapiens
aggggcctagaccctcgcagga

SEQ ID NO: 644 - DNA, 21 bp, Homo sapiens
aggggcaaccacacaggaaaa

SEQ ID NO: 645 - DNA, 20 bp, Homo sapiens
aggaacactagggaggagga

SEQ ID NO: 646 - DNA, 20 bp, Homo sapiens
aagggtaccaccacaggaaa

SEQ ID NO: 647 - DNA, 21 bp, Homo sapiens
aaggacactagagttacatgg

SEQ ID NO: 648 - DNA, 20 bp, Homo sapiens
aaggacacagaccccgagga

SEQ ID NO: 649 - DNA, 17 bp, Homo sapiens
ggatgcaaaccacagga

SEQ ID NO: 650 - DNA, 18 bp, Homo sapiens
aggacactgaggcctaga

SEQ ID NO: 651 - DNA, 20 bp, Homo sapiens
ggagaccctgagcccacagg

SEQ ID NO: 652 - DNA, 18 bp, Homo sapiens
ggctgcagaacaggaaaa

SEQ ID NO: 653 - DNA, 22 bp, Homo sapiens
ggacacaggccggtcaggaaaa

SEQ ID NO: 654 - DNA, 22 bp, Homo sapiens
aaggacactcagggacggagga

SEQ ID NO: 655 - DNA, 25 bp, Homo sapiens
aagacactgatgtccacttgtggga

SEQ ID NO: 656 - DNA, 21 bp, Homo sapiens
aaggacacagacagtacggga

SEQ ID NO: 657 - DNA, 20 bp, Homo sapiens
aaggacacagacgcggggga

SEQ ID NO: 658 - DNA, 19 bp, Homo sapiens
ggagacaacttcccacagg

SEQ ID NO: 659 - DNA, 14 bp, Homo sapiens
ggaactcacaggaa

SEQ ID NO: 660 - DNA, 20 bp, Homo sapiens
ggagacactagctccaggga

SEQ ID NO: 661 - DNA, 20 bp, Homo sapiens
agaagccccacccacaggaa

SEQ ID NO: 662 - DNA, 21 bp, Homo sapiens
aaggccacacacacaggaaaa

SEQ ID NO: 663 - DNA, 20 bp, Homo sapiens
aaggacacagacccaagaga

SEQ ID NO: 664 - DNA, 91 bp, Equine herpesvirus 2
ggttctcttgtagccctccaacattggaagccagcactgagaagtgtttgggttaaagtccctgatgtagaggaggtcgcactcgacggcc

SEQ ID NO: 665 - DNA, 24 bp, Equine herpesvirus 2
tctcttgtagccctccaacattgg

SEQ ID NO: 666 - DNA, 24 bp, Equine herpesvirus 2
tccctgatgtagaggaggtcgcac

SEQ ID NO: 667 - DNA, 22 bp, Homo sapiens
cctcctccttctctaacattgg

SEQ ID NO: 668 - DNA, 23 bp, Homo sapiens
tctcttgtagtcattctccttgg

SEQ ID NO: 669 - DNA, 19 bp, Homo sapiens
tcttgtagcccctcaccat

SEQ ID NO: 670 - DNA, 17 bp, Homo sapiens
tctcttgtgtccttcaa

SEQ ID NO: 671 - DNA, 15 bp, Homo sapiens
tctctgtacaacatt

SEQ ID NO: 672 - DNA, 21 bp, Homo sapiens
tcttgtaggtttcgacattgg

SEQ ID NO: 673 - DNA, 22 bp, Homo sapiens
tcctttgtagccctctccactg

SEQ ID NO: 674 - DNA, 81 bp, Equine herpesvirus 2
ctcattttaaaatagcttgtcgggctgtgtctattcttctttatgtccacagacacaacacacaagctaccttactatgag

SEQ ID NO: 675 - DNA, 24 bp, Equine herpesvirus 2
tagcttgtcgggctgtgtctattc

SEQ ID NO: 676 - DNA, 24 bp, Equine herpesvirus 2
acacaacacacaagctaccttact

SEQ ID NO: 677 - DNA, 20 bp, Homo sapiens
gctggggccgtgtgtctatt

SEQ ID NO: 678 - DNA, 60 bp, Equine herpesvirus 2
cccctcctcttgcaggtacgtggccccgcccagtgggatgggctttggatgggggagggg

SEQ ID NO: 679 - DNA, 18 bp, Equine herpesvirus 2
ctttggatgggggagggg

SEQ ID NO: 680 - DNA, 24 bp, Equine herpesvirus 2
tgcaggtacgtggccccgcccagt

SEQ ID NO: 681 - DNA, 20 bp, Homo sapiens
ctctggatgccagggagggg

SEQ ID NO: 682 - DNA, 15 bp, Homo sapiens
cttcgcgaggagggg

SEQ ID NO: 683 - DNA, 18 bp, Homo sapiens
ctttggtatggggagggg

SEQ ID NO: 684 - DNA, 17 bp, Homo sapiens
ccttggccaaggagggg

SEQ ID NO: 685 - DNA, 15 bp, Homo sapiens
ctctgaagggagggg

SEQ ID NO: 686 - DNA, 17 bp, Homo sapiens
ccgaagatggggggggg

SEQ ID NO: 687 - DNA, 17 bp, Homo sapiens
ctgtggctggggagggg

SEQ ID NO: 688 - DNA, 18 bp, Homo sapiens
ctctggctgcgggagggg

SEQ ID NO: 689 - DNA, 15 bp, Homo sapiens
ctctcgggggagggg

SEQ ID NO: 690 - DNA, 17 bp, Homo sapiens
ctttactaagggagggg

SEQ ID NO: 691 - DNA, 20 bp, Homo sapiens
ctttggggagaagggagggg

SEQ ID NO: 692 - DNA, 20 bp, Homo sapiens
cttagggaaatcaggagggg

SEQ ID NO: 693 - DNA, 17 bp, Homo sapiens
ctccggtgggggagggg

SEQ ID NO: 694 - DNA, 18 bp, Homo sapiens
tttgagcagggggagggg

SEQ ID NO: 695 - DNA, 16 bp, Homo sapiens
ctgtggcagggagggg

SEQ ID NO: 696 - DNA, 18 bp, Homo sapiens
ctttgggtgtgggagggg

SEQ ID NO: 697 - DNA, 17 bp, Homo sapiens
cttcctgcggggagggg

SEQ ID NO: 698 - DNA, 15 bp, Homo sapiens
cttcgggaggagggg

SEQ ID NO: 699 - DNA, 18 bp, Homo sapiens
ctatggatgggaatcagg

SEQ ID NO: 700 - DNA, 18 bp, Homo sapiens
tctgggtgtctggagggg

SEQ ID NO: 701 - DNA, 17 bp, Homo sapiens
caatggtgggggagggg

SEQ ID NO: 702 - DNA, 17 bp, Homo sapiens
cccctttgggggagggg

SEQ ID NO: 703 - DNA, 16 bp, Homo sapiens
ctttgcaagggagggg

SEQ ID NO: 704 - DNA, 17 bp, Homo sapiens
ctgtggacggggagggg

SEQ ID NO: 705 - DNA, 19 bp, Homo sapiens
ccttggatgggccgcgggg

SEQ ID NO: 706 - DNA, 18 bp, Homo sapiens
tttgtgtggggggagggg

SEQ ID NO: 707 - DNA, 18 bp, Homo sapiens
ctctgatgacaggagggg

SEQ ID NO: 708 - DNA, 18 bp, Homo sapiens
ccttgctgtggggagggg

SEQ ID NO: 709 - DNA, 16 bp, Homo sapiens
ctttgacagggagggg

SEQ ID NO: 710 - DNA, 17 bp, Homo sapiens
caacggtgggggagggg

SEQ ID NO: 711 - DNA, 16 bp, Homo sapiens
ccttgggtaagagggg

SEQ ID NO: 712 - DNA, 17 bp, Homo sapiens
cttaggtgtaggagggg

SEQ ID NO: 713 - DNA, 15 bp, Homo sapiens
ctctgaggggagggg

SEQ ID NO: 714 - DNA, 16 bp, Homo sapiens
ctctgggagggagggg

SEQ ID NO: 715 - DNA, 17 bp, Homo sapiens
ctttggaaaaggagggg

SEQ ID NO: 716 - DNA, 20 bp, Homo sapiens
cttcggatggaaccttgggg

SEQ ID NO: 717 - DNA, 17 bp, Homo sapiens
ctgtgtcgggggagggg

SEQ ID NO: 718 - DNA, 16 bp, Homo sapiens
ctttggaggggagggg

SEQ ID NO: 719 - DNA, 18 bp, Homo sapiens
cttagggtggaggaaggg

SEQ ID NO: 720 - DNA, 20 bp, Homo sapiens
cttgggaaaggggggagggg

SEQ ID NO: 721 - DNA, 16 bp, Homo sapiens
ctttgctggggagggg

SEQ ID NO: 722 - DNA, 18 bp, Homo sapiens
ctgtgtatgtgggagggg

SEQ ID NO: 723 - DNA, 20 bp, Homo sapiens
ccttggggaggaaggagggg

SEQ ID NO: 724 - DNA, 15 bp, Homo sapiens
ctctgtagggagggg

SEQ ID NO: 725 - DNA, 15 bp, Homo sapiens
ctttaggagaagggg

SEQ ID NO: 726 - DNA, 18 bp, Homo sapiens
tctgcctggggggagggg

SEQ ID NO: 727 - DNA, 18 bp, Homo sapiens
tctgcctgcggggagggg

SEQ ID NO: 728 - DNA, 19 bp, Homo sapiens
tttgggagggaagaagggg

SEQ ID NO: 729 - DNA, 20 bp, Homo sapiens
ctttaggtgtaggggagggg

SEQ ID NO: 730 - DNA, 18 bp, Homo sapiens
ctctggagaccagagggg

SEQ ID NO: 731 - DNA, 15 bp, Homo sapiens
ctttggaaaaagggg

SEQ ID NO: 732 - DNA, 18 bp, Homo sapiens
tttggggacaggaagggg

SEQ ID NO: 733 - DNA, 15 bp, Homo sapiens
ccttagggggagggg

SEQ ID NO: 734 - DNA, 18 bp, Homo sapiens
ctgtgggcaaaaaagggg

SEQ ID NO: 735 - DNA, 16 bp, Homo sapiens
ctcccggggggagggg

SEQ ID NO: 736 - DNA, 18 bp, Homo sapiens
ctctggagtggggagggg

SEQ ID NO: 737 - DNA, 18 bp, Homo sapiens
ccttggatgggtccaggg

SEQ ID NO: 738 - DNA, 18 bp, Homo sapiens
ctttggaagtttaagggg

SEQ ID NO: 739 - DNA, 18 bp, Homo sapiens
tttggtccgagggagggg

SEQ ID NO: 740 - DNA, 17 bp, Homo sapiens
ctttaccaagggagggg

SEQ ID NO: 741 - DNA, 20 bp, Homo sapiens
ctctggatgggaaaaagggg

SEQ ID NO: 742 - DNA, 17 bp, Homo sapiens
ctgtgaatggggagggg

SEQ ID NO: 743 - DNA, 18 bp, Homo sapiens
ctttgggaaaaaaagggg

SEQ ID NO: 744 - DNA, 15 bp, Homo sapiens
ctctagagggagggg

SEQ ID NO: 745 - DNA, 14 bp, Homo sapiens
ctttggaagagggg

SEQ ID NO: 746 - DNA, 15 bp, Homo sapiens
ccttgagaggagggg

SEQ ID NO: 747 - DNA, 15 bp, Homo sapiens
cctctgggggagggg

SEQ ID NO: 748 - DNA, 64 bp, Equine herpesvirus 2
tatgtcatgatcttaatgtagcacctttatttgaaaaaaagtcctccattaggatcatcacata

SEQ ID NO: 749 - DNA, 24 bp, Equine herpesvirus 2
tgtcatgatcttaatgtagcacct

SEQ ID NO: 750 - DNA, 23 bp, Equine herpesvirus 2
tcctccattaggatcatcacata

SEQ ID NO: 751 - DNA, 22 bp, Homo sapiens
tgtcgtatttcctgcagcacct

SEQ ID NO: 752 - DNA, 20 bp, Homo sapiens
tgtcacgattttcatttagc

SEQ ID NO: 753 - DNA, 22 bp, Homo sapiens
tatcatgattttcccagcacct

SEQ ID NO: 754 - DNA, 23 bp, Homo sapiens
tgttgtatcttaatggtgtacct

SEQ ID NO: 755 - DNA, 131 bp, Equine herpesvirus 2
ttggcctggatcttgaggttggagatgttgccgctctggtcgcggcgggggttcatgttgtggaggacgacgaggacggcgtagccggtgcagcgggggaagcgggcgtgcagcttggaggggaaggcgtg

SEQ ID NO: 756 - DNA, 24 bp, Equine herpesvirus 2
agatgttgccgctctggtcgcggc

SEQ ID NO: 757 - DNA, 24 bp, Equine herpesvirus 2
cagcgggggaagcgggcgtgcagc

SEQ ID NO: 758 - DNA, 19 bp, Homo sapiens
agatgttgtcctccctggt

SEQ ID NO: 759 - DNA, 20 bp, Homo sapiens
gatgttactgtacagcgtgg

SEQ ID NO: 760 - DNA, 17 bp, Homo sapiens
agcgaggggggcggggc

SEQ ID NO: 761 - DNA, 22 bp, Homo sapiens
gcgggggcgagcacgctgcggc

SEQ ID NO: 762 - DNA, 20 bp, Homo sapiens
gcggaggaggtggatgcggc

SEQ ID NO: 763 - DNA, 21 bp, Homo sapiens
cagcgggggagggggcagggc

SEQ ID NO: 764 - DNA, 19 bp, Homo sapiens
gcggcgggagtgggcaggc

SEQ ID NO: 765 - DNA, 23 bp, Homo sapiens
gcggcgggagcgggctgcgcggc

SEQ ID NO: 766 - DNA, 22 bp, Homo sapiens
gcaggtggagcgggtgtgtggc

SEQ ID NO: 767 - DNA, 19 bp, Homo sapiens
cagcgggaggaggcggggc

SEQ ID NO: 768 - DNA, 20 bp, Homo sapiens
gcgggggagggaagagcagc

SEQ ID NO: 769 - DNA, 19 bp, Homo sapiens
cagtggtgggggcctgcag

SEQ ID NO: 770 - DNA, 16 bp, Homo sapiens
cggtggggaggcagca

SEQ ID NO: 771 - DNA, 21 bp, Homo sapiens
cagcggggaggtgctgttggc

SEQ ID NO: 772 - DNA, 17 bp, Homo sapiens
gcgggggagggtgtggc

SEQ ID NO: 773 - DNA, 19 bp, Homo sapiens
cagcggggaggggcgtggc

SEQ ID NO: 774 - DNA, 18 bp, Homo sapiens
gctgggggaagggtgcag

SEQ ID NO: 775 - DNA, 17 bp, Homo sapiens
cagcggggggagggggt

SEQ ID NO: 776 - DNA, 22 bp, Homo sapiens
cagcaggggaggctcctggcag

SEQ ID NO: 777 - DNA, 19 bp, Homo sapiens
gcgggggaggggagggggc

SEQ ID NO: 778 - DNA, 18 bp, Homo sapiens
gcgggggaggcgggaggc

SEQ ID NO: 779 - DNA, 17 bp, Homo sapiens
gcggggcaggcggaggc

SEQ ID NO: 780 - DNA, 21 bp, Homo sapiens
gcggggcgagcgcgagctggc

SEQ ID NO: 781 - DNA, 22 bp, Homo sapiens
cagcgggggtggccacggcagc

SEQ ID NO: 782 - DNA, 19 bp, Homo sapiens
cagcgggcagggtgtgcag

SEQ ID NO: 783 - DNA, 19 bp, Homo sapiens
cagcgggcggaagcggggc

SEQ ID NO: 784 - DNA, 18 bp, Homo sapiens
cagcggggaggtggcagc

SEQ ID NO: 785 - DNA, 18 bp, Homo sapiens
gcgggggagtggagaggc

SEQ ID NO: 786 - DNA, 20 bp, Homo sapiens
cagcggggggacgaggcggc

SEQ ID NO: 787 - DNA, 17 bp, Homo sapiens
cagcggggaggcggggc

SEQ ID NO: 788 - DNA, 19 bp, Homo sapiens
cagcgggggaggctgcggg

SEQ ID NO: 789 - DNA, 18 bp, Homo sapiens
gcaggggaggtggcaggc

SEQ ID NO: 790 - DNA, 20 bp, Homo sapiens
gcggggcggagctgagtggc

SEQ ID NO: 791 - DNA, 17 bp, Homo sapiens
gcggcggaggctgcggc

SEQ ID NO: 792 - DNA, 20 bp, Homo sapiens
gcggaggaggtggcggaggc

SEQ ID NO: 793 - DNA, 19 bp, Homo sapiens
gcgggggaacggggagagc

SEQ ID NO: 794 - DNA, 23 bp, Homo sapiens
cagcgggagggggcagacgcggc

SEQ ID NO: 795 - DNA, 18 bp, Homo sapiens
gcggaggaggcgcgcggc

SEQ ID NO: 796 - DNA, 22 bp, Homo sapiens
cagcgggggcggcggcgcgggc

SEQ ID NO: 797 - DNA, 17 bp, Homo sapiens
gcgagggaggcagcggc

SEQ ID NO: 798 - DNA, 22 bp, Homo sapiens
agcgggggcagcgggaacccgc

SEQ ID NO: 799 - DNA, 26 bp, Homo sapiens
cagcggagggagtggaggtgctgcag

SEQ ID NO: 800 - DNA, 16 bp, Homo sapiens
gcggggaagcagcagc

SEQ ID NO: 801 - DNA, 15 bp, Homo sapiens
gcgggggaggcgcgc

SEQ ID NO: 802 - DNA, 19 bp, Homo sapiens
agcgggggaagcgcgcggc

SEQ ID NO: 803 - DNA, 15 bp, Homo sapiens
gcggggcgagcgcgc

SEQ ID NO: 804 - DNA, 18 bp, Homo sapiens
gcgggggaaggggcgggc

SEQ ID NO: 805 - DNA, 62 bp, Equine herpesvirus 2
gccttctaccctccttatatatattatatattgtttattatattgaaaaaggaagtacaggt

SEQ ID NO: 806 - DNA, 24 bp, Equine herpesvirus 2
ttatattgaaaaaggaagtacagg

SEQ ID NO: 807 - DNA, 24 bp, Equine herpesvirus 2
tctaccctccttatatatattata

SEQ ID NO: 808 - DNA, 22 bp, Homo sapiens
tcatattgaaggaaattacagg

SEQ ID NO: 809 - DNA, 19 bp, Homo sapiens
tatattgaaaaggatcagg

SEQ ID NO: 810 - DNA, 18 bp, Homo sapiens
ttattttgagaaaggaaa

SEQ ID NO: 811 - DNA, 22 bp, Homo sapiens
tattcaaaaagggaagtatagg

SEQ ID NO: 812 - DNA, 22 bp, Homo sapiens
ttatattgataacaggtacagg

SEQ ID NO: 813 - DNA, 18 bp, Homo sapiens
taccctccttgttcatat

SEQ ID NO: 814 - DNA, 65 bp, Fowlpox virus
tatatcacgctctattgtatagatcgtctaacgttgaatcgctgatattacacggagcggatata

SEQ ID NO: 815 - DNA, 20 bp, Fowlpox virus
tattacacggagcggatata

SEQ ID NO: 816 - DNA, 24 bp, Fowlpox virus
tatcacgctctattgtatagatcg

SEQ ID NO: 817 - DNA, 18 bp, Homo sapiens
ttacacaacactggatat

SEQ ID NO: 818 - DNA, 70 bp, Fowlpox virus
ccggctgagtcatcgcccgaggacgcgcccacgaccaaaaaaggtgcctcctcgagggcgggacgtccgg

SEQ ID NO: 819 - DNA, 24 bp, Fowlpox virus
tgagtcatcgcccgaggacgcgcc

SEQ ID NO: 820 - DNA, 24 bp, Fowlpox virus
tgcctcctcgagggcgggacgtcc

SEQ ID NO: 821 - DNA, 18 bp, Homo sapiens
tgagtcattgctgggaac

SEQ ID NO: 822 - DNA, 17 bp, Homo sapiens
tgagtcatcgctcagga

SEQ ID NO: 823 - DNA, 127 bp, Fowlpox virus
gtgagtttaccacggcagcgaaagccttgacggtctcgtaggccttggtcatgtccgacaccatgcccccgtcggaaaaggcagaggcgtacttggtaacgtcggtggcgtcgaccgccgcggacac

SEQ ID NO: 824 - DNA, 24 bp, Fowlpox virus
tcgtaggccttggtcatgtccgac

SEQ ID NO: 825 - DNA, 24 bp, Fowlpox virus
ggaaaaggcagaggcgtacttggt

SEQ ID NO: 826 - DNA, 18 bp, Homo sapiens
ggtttttggtcatgttcg

SEQ ID NO: 827 - DNA, 21 bp, Homo sapiens
ggaggaggagggggtcacggt

SEQ ID NO: 828 - DNA, 17 bp, Homo sapiens
ggatggggcagaggtgg

SEQ ID NO: 829 - DNA, 18 bp, Homo sapiens
agaaaaggtagagtttgg

SEQ ID NO: 830 - DNA, 20 bp, Homo sapiens
ggaagcagaatccacttggt

SEQ ID NO: 831 - DNA, 18 bp, Homo sapiens
ggaggaggcggaggcgca

SEQ ID NO: 832 - DNA, 23 bp, Homo sapiens
gaagaaggcagaggttgccgggt

SEQ ID NO: 833 - DNA, 22 bp, Homo sapiens
gagaaaggcaggggcaaagggt

SEQ ID NO: 834 - DNA, 21 bp, Homo sapiens
ggaggagacagaggcgatggt

SEQ ID NO: 835 - DNA, 21 bp, Homo sapiens
ggcagagggcgggggccgggt

SEQ ID NO: 836 - DNA, 21 bp, Homo sapiens
ggcaagggcagagggcatggt

SEQ ID NO: 837 - DNA, 22 bp, Homo sapiens
ggaggggcaacgctcacttggt

SEQ ID NO: 838 - DNA, 16 bp, Homo sapiens
ggaaaaggcagatgtg

SEQ ID NO: 839 - DNA, 60 bp, Fowlpox virus
tcctcacggggtgccttatcttgttttcgagagattccagcatcaggtccccgtcgagga

SEQ ID NO: 840 - DNA, 17 bp, Fowlpox virus
caggtccccgtcgagga

SEQ ID NO: 841 - DNA, 24 bp, Fowlpox virus
tgccttatcttgttttcgagagat

SEQ ID NO: 842 - DNA, 20 bp, Homo sapiens
tctttgtctccctgagagat

SEQ ID NO: 843 - DNA, 20 bp, Homo sapiens
tgcttgtttcgttttgagag

SEQ ID NO: 844 - DNA, 17 bp, Homo sapiens
tgtcttatctgtgagag

SEQ ID NO: 845 - DNA, 23 bp, Homo sapiens
ccttattttgttttttatctctg

SEQ ID NO: 846 - DNA, 26 bp, Homo sapiens
ccttattttgtttttatatctctcga

SEQ ID NO: 847 - DNA, 75 bp, Fowlpox virus
gagttgcaaatgctcctccgacgagaggctcactcaccagagcctctctggcgggaggttcagcgtcaccggctc

SEQ ID NO: 848 - DNA, 24 bp, Fowlpox virus
tggcgggaggttcagcgtcaccgg

SEQ ID NO: 849 - DNA, 24 bp, Fowlpox virus
aaatgctcctccgacgagaggctc

SEQ ID NO: 850 - DNA, 23 bp, Homo sapiens
ggatgcatcttccgaagaggctc

SEQ ID NO: 851 - DNA, 19 bp, Homo sapiens
aaatgcccagggaggggct

SEQ ID NO: 852 - DNA, 18 bp, Homo sapiens
ggacgctcctctgtggct

SEQ ID NO: 853 - DNA, 22 bp, Homo sapiens
aaatgcctcttaccaagaggct

SEQ ID NO: 854 - DNA, 17 bp, Homo sapiens
atgcttcctgagaggct

SEQ ID NO: 855 - DNA, 19 bp, Homo sapiens
aaatgctccccgatccgct

SEQ ID NO: 856 - DNA, 19 bp, Homo sapiens
gctcccggatggagaggct

SEQ ID NO: 857 - DNA, 21 bp, Homo sapiens
tgccccttccccaagaggctc

SEQ ID NO: 858 - DNA, 17 bp, Homo sapiens
aaatgctctctgaccaa

SEQ ID NO: 859 - DNA, 17 bp, Homo sapiens
tgctgtactgagaggct

SEQ ID NO: 860 - DNA, 128 bp, Fowlpox virus
gggaggagcagtacggaatatccggtcaggagggtggagttgagggtatcccattggcgagcgtagcgagccaatgggatatccgtaaacggaactctcctgaccggatattccgtactgctccgacc

SEQ ID NO: 861 - DNA, 20 bp, Fowlpox virus
tattccgtactgctccgacc

SEQ ID NO: 862 - DNA, 24 bp, Fowlpox virus
cggaatatccggtcaggagggtgg

SEQ ID NO: 863 - DNA, 19 bp, Homo sapiens
tattcctactccagtgacc

SEQ ID NO: 864 - DNA, 19 bp, Homo sapiens
tattccgtacagttcctga

SEQ ID NO: 865 - DNA, 17 bp, Homo sapiens
tactcctggctctgacc

SEQ ID NO: 866 - DNA, 20 bp, Homo sapiens
cattctgtacttctcttgac

SEQ ID NO: 867 - DNA, 18 bp, Homo sapiens
ttcctgtagcctccgacc

SEQ ID NO: 868 - DNA, 19 bp, Homo sapiens
tattccgcaggtcctggcc

SEQ ID NO: 869 - DNA, 18 bp, Homo sapiens
ttcctattgctccaaacc

SEQ ID NO: 870 - DNA, 62 bp, Fowlpox virus
cgacgcttttcttccttctcccgcagccgctcccttctgcgctgctccttctcctcgcgttg

SEQ ID NO: 871 - DNA, 24 bp, Fowlpox virus
acgcttttcttccttctcccgcag

SEQ ID NO: 872 - DNA, 20 bp, Fowlpox virus
tgctccttctcctcgcgttg

SEQ ID NO: 873 - DNA, 22 bp, Homo sapiens
gccacagctccttctcctgcag

SEQ ID NO: 874 - DNA, 22 bp, Homo sapiens
gcttttcttctaatccttgcag

SEQ ID NO: 875 - DNA, 19 bp, Homo sapiens
acgctttttttttttcctt

SEQ ID NO: 876 - DNA, 26 bp, Homo sapiens
gctttttttttccttctttaaatcag

SEQ ID NO: 877 - DNA, 18 bp, Homo sapiens
cgctctttccttctctcg

SEQ ID NO: 878 - DNA, 18 bp, Homo sapiens
actttttttttccttctc

SEQ ID NO: 879 - DNA, 22 bp, Homo sapiens
cgctttccaggccctcttttcc

SEQ ID NO: 880 - DNA, 18 bp, Homo sapiens
ttttcctcctttttgcag

SEQ ID NO: 881 - DNA, 18 bp, Homo sapiens
ttttcttttttcccacag

SEQ ID NO: 882 - DNA, 18 bp, Homo sapiens
gctccttcttctgagttg

SEQ ID NO: 883 - DNA, 18 bp, Homo sapiens
tgctcctcctccaccctg

SEQ ID NO: 884 - DNA, 17 bp, Homo sapiens
ctccttctctaacattg

SEQ ID NO: 885 - DNA, 21 bp, Homo sapiens
tgctcctcctccctcccgttg

SEQ ID NO: 886 - DNA, 20 bp, Homo sapiens
tgctcctctctccttcattg

SEQ ID NO: 887 - DNA, 14 bp, Homo sapiens
tgcttcctcacgtt

SEQ ID NO: 888 - DNA, 19 bp, Homo sapiens
tgctccttgctcacagttg

SEQ ID NO: 889 - DNA, 18 bp, Homo sapiens
gctccttctcttccgttg

SEQ ID NO: 890 - DNA, 22 bp, Homo sapiens
tgctccttcttgtttctcattg

SEQ ID NO: 891 - DNA, 17 bp, Homo sapiens
ctctttctctcacgttg

SEQ ID NO: 892 - DNA, 19 bp, Homo sapiens
tgctccctctgggaggttg

SEQ ID NO: 893 - DNA, 18 bp, Homo sapiens
tgctcctttgttcggctg

SEQ ID NO: 894 - DNA, 18 bp, Homo sapiens
tgctcttctcctcctcgt

SEQ ID NO: 895 - DNA, 17 bp, Homo sapiens
tgttccttctacccagt

SEQ ID NO: 896 - DNA, 86 bp, Fowlpox virus
ggagctggtcgtaggctcccagggactttatctgatacctagcgaatcctgaggcgtcaaagttaagcttggtcatgaccagctcc

SEQ ID NO: 897 - DNA, 24 bp, Fowlpox virus
cgtcaaagttaagcttggtcatga

SEQ ID NO: 898 - DNA, 24 bp, Fowlpox virus
agggactttatctgatacctagcg

SEQ ID NO: 899 - DNA, 19 bp, Homo sapiens
tcagggttccatggtcatg

SEQ ID NO: 900 - DNA, 23 bp, Homo sapiens
gtcaaagttagcctggtacatga

SEQ ID NO: 901 - DNA, 21 bp, Homo sapiens
cgttcaaaaacttggttatga

SEQ ID NO: 902 - DNA, 20 bp, Homo sapiens
attaaggttggaaatcatga

SEQ ID NO: 903 - DNA, 18 bp, Homo sapiens
gtaggagttaagctgtgg

SEQ ID NO: 904 - DNA, 21 bp, Homo sapiens
gtaaagttgataaggtcatga

SEQ ID NO: 905 - DNA, 21 bp, Homo sapiens
gccaggatgggcttggtcgtg

SEQ ID NO: 906 - DNA, 22 bp, Homo sapiens
gttaaagttaacctcattcgtg

SEQ ID NO: 907 - DNA, 18 bp, Homo sapiens
gggatccctgatacctag

SEQ ID NO: 908 - DNA, 20 bp, Homo sapiens
gggacgttggggacacctag

SEQ ID NO: 909 - DNA, 83 bp, Fowlpox virus
tgcagggggaataaccggatccctgtccctagcatcaagccgcagcctgctttttgaagttgacaaagatatttcccacctca

SEQ ID NO: 910 - DNA, 23 bp, Fowlpox virus
tgacaaagatatttcccacctca

SEQ ID NO: 911 - DNA, 24 bp, Fowlpox virus
aaccggatccctgtccctagcatc

SEQ ID NO: 912 - DNA, 23 bp, Homo sapiens
tgacaaaaatgttttcttctcct

SEQ ID NO: 913 - DNA, 20 bp, Homo sapiens
acaaggaatgctccacctca

SEQ ID NO: 914 - DNA, 18 bp, Homo sapiens
tgaggtagacccacctca

SEQ ID NO: 915 - DNA, 21 bp, Homo sapiens
acagagaatgcgacccacctc

SEQ ID NO: 916 - DNA, 19 bp, Homo sapiens
gatcaaccctcccacctca

SEQ ID NO: 917 - DNA, 17 bp, Homo sapiens
tgacaaagattttcaca

SEQ ID NO: 918 - DNA, 18 bp, Homo sapiens
tgacaaaacaaccacttc

SEQ ID NO: 919 - DNA, 14 bp, Homo sapiens
acaaagacccacct

SEQ ID NO: 920 - DNA, 23 bp, Homo sapiens
tgatgggaagaaaacccacctca

SEQ ID NO: 921 - DNA, 18 bp, Homo sapiens
aaccggattctacagcat

SEQ ID NO: 922 - DNA, 21 bp, Homo sapiens
aaccagatgatctcctggcat

SEQ ID NO: 923 - DNA, 26 bp, Homo sapiens
aaccagatctctgtcctggctccatc

SEQ ID NO: 924 - DNA, 129 bp, Fowlpox virus
ccgggtggggggtggccccgctgggcaccgctgcgccgccgccaggtcctggggcagccggggttcctggcgctccgggggcagccgggcggccgccggtgggtccgctgggccgctgccccgctccgg

SEQ ID NO: 925 - DNA, 24 bp, Fowlpox virus
cgctccgggggcagccgggcggcc

SEQ ID NO: 926 - DNA, 24 bp, Fowlpox virus
ccgccaggtcctggggcagccggg

SEQ ID NO: 927 - DNA, 18 bp, Homo sapiens
ccctcctggctgggtggc

SEQ ID NO: 928 - DNA, 19 bp, Homo sapiens
tcctctgggcccgggcggc

SEQ ID NO: 929 - DNA, 22 bp, Homo sapiens
gctctgggccctgcgggtggcc

SEQ ID NO: 930 - DNA, 19 bp, Homo sapiens
ccgggggctcccggtggcc

SEQ ID NO: 931 - DNA, 24 bp, Homo sapiens
gccccgggggtggtgttcttggcc

SEQ ID NO: 932 - DNA, 18 bp, Homo sapiens
tctgggggcagcagtggg

SEQ ID NO: 933 - DNA, 16 bp, Homo sapiens
cggggggagggcggcc

SEQ ID NO: 934 - DNA, 18 bp, Homo sapiens
gctctgggggcagctggc

SEQ ID NO: 935 - DNA, 26 bp, Homo sapiens
cgctccggcggcgggcgcaggcggcc

SEQ ID NO: 936 - DNA, 20 bp, Homo sapiens
gctccggggacggcggcggc

SEQ ID NO: 937 - DNA, 24 bp, Homo sapiens
cgctccggggtcggggcgcgcggc

SEQ ID NO: 938 - DNA, 16 bp, Homo sapiens
cgcccgggggcagggc

SEQ ID NO: 939 - DNA, 16 bp, Homo sapiens
gcccgggggcggttgg

SEQ ID NO: 940 - DNA, 19 bp, Homo sapiens
gctccgggcgtgggcggcc

SEQ ID NO: 941 - DNA, 17 bp, Homo sapiens
gcgccgggggcccgcgg

SEQ ID NO: 942 - DNA, 18 bp, Homo sapiens
gctcggggggcagtctgc

SEQ ID NO: 943 - DNA, 23 bp, Homo sapiens
gctctgtggggcctggagcggcc

SEQ ID NO: 944 - DNA, 17 bp, Homo sapiens
gctccggggaccgcggc

SEQ ID NO: 945 - DNA, 18 bp, Homo sapiens
gctctggggcggggcggc

SEQ ID NO: 946 - DNA, 18 bp, Homo sapiens
cttttggggagggggcgg

SEQ ID NO: 947 - DNA, 17 bp, Homo sapiens
gcttgggggcaagtggc

SEQ ID NO: 948 - DNA, 19 bp, Homo sapiens
ctcccgtagctgggcggcc

SEQ ID NO: 949 - DNA, 23 bp, Homo sapiens
gctccgggggctccgagggtggc

SEQ ID NO: 950 - DNA, 21 bp, Homo sapiens
cgccccgggggtctcgcggcc

SEQ ID NO: 951 - DNA, 22 bp, Homo sapiens
cgctccggcggcggcgggggcc

SEQ ID NO: 952 - DNA, 21 bp, Homo sapiens
ccctctggggtggcgggcggc

SEQ ID NO: 953 - DNA, 21 bp, Homo sapiens
ctccgggggcgggctccggcc

SEQ ID NO: 954 - DNA, 19 bp, Homo sapiens
gcaggtcctggggcctggg

SEQ ID NO: 955 - DNA, 15 bp, Homo sapiens
ccgcgggtccagccg

SEQ ID NO: 956 - DNA, 16 bp, Homo sapiens
gccaggaggcagctgg

SEQ ID NO: 957 - DNA, 20 bp, Homo sapiens
gccaggtcctggggccaggg

SEQ ID NO: 958 - DNA, 20 bp, Homo sapiens
ccaggtcctgggagtttggg

SEQ ID NO: 959 - DNA, 21 bp, Homo sapiens
ccccgggcacgggcggccggg

SEQ ID NO: 960 - DNA, 21 bp, Homo sapiens
cgccgagtcctggctcccggg

SEQ ID NO: 961 - DNA, 20 bp, Homo sapiens
gctagggcggggcggctggg

SEQ ID NO: 962 - DNA, 23 bp, Homo sapiens
gctggcagggaggggcagctggg

SEQ ID NO: 963 - DNA, 21 bp, Homo sapiens
gcaggtcctggggtggctggg

SEQ ID NO: 964 - DNA, 21 bp, Homo sapiens
cgccatgcgctggcagccggg

SEQ ID NO: 965 - DNA, 14 bp, Homo sapiens
gccaggcccggccg

SEQ ID NO: 966 - DNA, 26 bp, Homo sapiens
caccaggtccatgctgggcagctggg

SEQ ID NO: 967 - DNA, 21 bp, Homo sapiens
ccaggtcctcccgtagctggg

SEQ ID NO: 968 - DNA, 24 bp, Homo sapiens
cgccggcgggcaggggcagccggg

SEQ ID NO: 969 - DNA, 23 bp, Homo sapiens
ccgccagggtctggggccccggg

SEQ ID NO: 970 - DNA, 20 bp, Homo sapiens
ccgggtcctggggtccctgg

SEQ ID NO: 971 - DNA, 17 bp, Homo sapiens
cctcaggaggcagctgg

SEQ ID NO: 972 - DNA, 17 bp, Homo sapiens
ccgccaggggcagctgg

SEQ ID NO: 973 - DNA, 19 bp, Homo sapiens
caggtcctggtggtacaag

SEQ ID NO: 974 - DNA, 19 bp, Homo sapiens
caggtcctgggatagaggg

SEQ ID NO: 975 - DNA, 17 bp, Homo sapiens
ccaggtcctgtcattgg

SEQ ID NO: 976 - DNA, 17 bp, Homo sapiens
caggtcctgggggtggg

SEQ ID NO: 977 - DNA, 16 bp, Homo sapiens
gccaggttccagctgg

SEQ ID NO: 978 - DNA, 21 bp, Homo sapiens
ccgccggggccgcgggccggg

SEQ ID NO: 979 - DNA, 63 bp, Fowlpox virus
gcgccggcaagaccaccttcgagattaagcccatgtttaagcttcacgtcatctgcaacgcgc

SEQ ID NO: 980 - DNA, 24 bp, Fowlpox virus
ttaagcttcacgtcatctgcaacg

SEQ ID NO: 981 - DNA, 24 bp, Fowlpox virus
ggcaagaccaccttcgagattaag

SEQ ID NO: 982 - DNA, 23 bp, Homo sapiens
ttaagcctcaatcctctgcagcg

SEQ ID NO: 983 - DNA, 22 bp, Homo sapiens
ggcaggcactaccaagattaag

SEQ ID NO: 984 - DNA, 17 bp, Homo sapiens
ggtgaggccccttcaaa

SEQ ID NO: 985 - DNA, 19 bp, Homo sapiens
ggcaagacctccccaatta

SEQ ID NO: 986 - DNA, 15 bp, Homo sapiens
gggaccacctttgaa

SEQ ID NO: 987 - DNA, 98 bp, Fowlpox virus
ggtgtcgtcatgaccaccctgtgggctccccccaaatgtctagaaccggccacggccggtctccgttctcggagacccgaagtgtcgtcatgatcacc

SEQ ID NO: 988 - DNA, 24 bp, Fowlpox virus
accctgtgggctccccccaaatgt

SEQ ID NO: 989 - DNA, 24 bp, Fowlpox virus
tccgttctcggagacccgaagtgt

SEQ ID NO: 990 - DNA, 23 bp, Homo sapiens
cctcattatctctccccaaatgt

SEQ ID NO: 991 - DNA, 22 bp, Homo sapiens
ccgctgtgtgcattccaaatgt

SEQ ID NO: 992 - DNA, 23 bp, Homo sapiens
accctggggtgttttctaaatgt

SEQ ID NO: 993 - DNA, 21 bp, Homo sapiens
cctgctgttccccccaaatgt

SEQ ID NO: 994 - DNA, 22 bp, Homo sapiens
ccctgtcccaccccccaaatgt

SEQ ID NO: 995 - DNA, 22 bp, Homo sapiens
ccctggcccaccccccaaatgt

SEQ ID NO: 996 - DNA, 21 bp, Homo sapiens
ccctgtgaagccctcagatgt

SEQ ID NO: 997 - DNA, 20 bp, Homo sapiens
cccggggaccccccgggtgt

SEQ ID NO: 998 - DNA, 20 bp, Homo sapiens
tgtgggccagccccagatgt

SEQ ID NO: 999 - DNA, 19 bp, Homo sapiens
ctgtgtttctcccaaatgt

SEQ ID NO: 1000 - DNA, 19 bp, Homo sapiens
cctgtgggcaggcagatgt

SEQ ID NO: 1001 - DNA, 18 bp, Homo sapiens
acccagtgggctctcccc

SEQ ID NO: 1002 - DNA, 103 bp, Fowlpox virus
ttgtgtcccgcatgctagagtatcctcgaggaggattcttctacagcaccgacatggcctgcatgatggagggtctcgcagaggagctagcaggaggacacaa

SEQ ID NO: 1003 - DNA, 24 bp, Fowlpox virus
tcgcagaggagctagcaggaggac

SEQ ID NO: 1004 - DNA, 24 bp, Fowlpox virus
gagtatcctcgaggaggattcttc

SEQ ID NO: 1005 - DNA, 15 bp, Homo sapiens
tccaggggaaggagg

SEQ ID NO: 1006 - DNA, 23 bp, Homo sapiens
gcagggctttctggtaggaggac

SEQ ID NO: 1007 - DNA, 20 bp, Homo sapiens
tcgcggcctgaggcaggagg

SEQ ID NO: 1008 - DNA, 18 bp, Homo sapiens
cgcgggaaggcaggagga

SEQ ID NO: 1009 - DNA, 20 bp, Homo sapiens
gagaggctgaggcaggagga

SEQ ID NO: 1010 - DNA, 19 bp, Homo sapiens
ggaggccaaggcaggagga

SEQ ID NO: 1011 - DNA, 17 bp, Homo sapiens
gcagaggaactggtgaa

SEQ ID NO: 1012 - DNA, 20 bp, Homo sapiens
gcagaggagcagacaacaga

SEQ ID NO: 1013 - DNA, 16 bp, Homo sapiens
ccggaggagaggagga

SEQ ID NO: 1014 - DNA, 20 bp, Homo sapiens
cagtggtgtagcaggaggac

SEQ ID NO: 1015 - DNA, 20 bp, Homo sapiens
tcccagaggggacaggagga

SEQ ID NO: 1016 - DNA, 20 bp, Homo sapiens
cgcagaggagttagttaagg

SEQ ID NO: 1017 - DNA, 21 bp, Homo sapiens
ccgcaggggtgaggcaggagg

SEQ ID NO: 1018 - DNA, 16 bp, Homo sapiens
gcaggaagtaggggga

SEQ ID NO: 1019 - DNA, 17 bp, Homo sapiens
tcgcgaggagctagggg

SEQ ID NO: 1020 - DNA, 18 bp, Homo sapiens
gcagaagggctgtcagga

SEQ ID NO: 1021 - DNA, 16 bp, Homo sapiens
gcagaagagttcagga

SEQ ID NO: 1022 - DNA, 19 bp, Homo sapiens
ggagactgaggcaggagga

SEQ ID NO: 1023 - DNA, 16 bp, Homo sapiens
tcgcagagagtggggg

SEQ ID NO: 1024 - DNA, 17 bp, Homo sapiens
tcgcagaggagttatag

SEQ ID NO: 1025 - DNA, 20 bp, Homo sapiens
gagagactgaggcaggagga

SEQ ID NO: 1026 - DNA, 18 bp, Homo sapiens
tcacagaggagctagaga

SEQ ID NO: 1027 - DNA, 21 bp, Homo sapiens
ccggggggagccaaggaggac

SEQ ID NO: 1028 - DNA, 19 bp, Homo sapiens
gagtagtctcgaggggatc

SEQ ID NO: 1029 - DNA, 19 bp, Homo sapiens
gaggtccttgtggattctt

SEQ ID NO: 1030 - DNA, 65 bp, Fowlpox virus
gtcagggcggctgacggtctcaagggtccaaattccatcgaccccgagacaaaaatggtcctgat

SEQ ID NO: 1031 - DNA, 21 bp, Fowlpox virus
cgagacaaaaatggtcctgat

SEQ ID NO: 1032 - DNA, 24 bp, Fowlpox virus
tgacggtctcaagggtccaaattc

SEQ ID NO: 1033 - DNA, 19 bp, Homo sapiens
gaaacagaactaccctgat

SEQ ID NO: 1034 - DNA, 17 bp, Homo sapiens
cgaggcaaggtcctgat

SEQ ID NO: 1035 - DNA, 16 bp, Homo sapiens
gagacaaaaagtccca

SEQ ID NO: 1036 - DNA, 17 bp, Homo sapiens
gacaaaaatatcttgat

SEQ ID NO: 1037 - DNA, 16 bp, Homo sapiens
gacaaaaaaggttgat

SEQ ID NO: 1038 - DNA, 17 bp, Homo sapiens
gagaacatggtcctgat

SEQ ID NO: 1039 - DNA, 20 bp, Homo sapiens
gagacaaaaggaaaattgat

SEQ ID NO: 1040 - DNA, 21 bp, Homo sapiens
gaggtaatggtccacgttgat

SEQ ID NO: 1041 - DNA, 19 bp, Homo sapiens
gagacagaggctggccctg

SEQ ID NO: 1042 - DNA, 18 bp, Homo sapiens
gaaacaaaaatgaagctg

SEQ ID NO: 1043 - DNA, 16 bp, Homo sapiens
aaaacaaaatcctgat

SEQ ID NO: 1044 - DNA, 14 bp, Homo sapiens
gagacacgatcctg

SEQ ID NO: 1045 - DNA, 18 bp, Homo sapiens
caaggcagaaatggcccc

SEQ ID NO: 1046 - DNA, 17 bp, Homo sapiens
aagacaaaagaactgat

SEQ ID NO: 1047 - DNA, 20 bp, Homo sapiens
gagacaatggtggccctgat

SEQ ID NO: 1048 - DNA, 17 bp, Homo sapiens
gataaaatggtcctgat

SEQ ID NO: 1049 - DNA, 21 bp, Homo sapiens
ggccccaaagggtctgaattc

SEQ ID NO: 1050 - DNA, 22 bp, Homo sapiens
tgacggtctaaagggtcaaatt

SEQ ID NO: 1051 - DNA, 90 bp, Fowlpox virus
gagacggtcgggcttgacgttgaggagctccagcttggacttgtccaccgagtttacgacagcgcaaatcttgtacagctcgtccttctt

SEQ ID NO: 1052 - DNA, 24 bp, Fowlpox virus
accgagtttacgacagcgcaaatc

SEQ ID NO: 1053 - DNA, 24 bp, Fowlpox virus
gaggagctccagcttggacttgtc

SEQ ID NO: 1054 - DNA, 23 bp, Homo sapiens
aggatatatcagtttggacttgt

SEQ ID NO: 1055 - DNA, 66 bp, Fowlpox virus
tccctcagtgtttgccagcttatttccccagttttcacgtactggggcctgtggacacctgaggga

SEQ ID NO: 1056 - DNA, 22 bp, Fowlpox virus
gggcctgtggacacctgaggga

SEQ ID NO: 1057 - DNA, 24 bp, Fowlpox virus
tcagtgtttgccagcttatttccc

SEQ ID NO: 1058 - DNA, 22 bp, Homo sapiens
gggcctgtgacgtggtccctcg

SEQ ID NO: 1059 - DNA, 23 bp, Homo sapiens
gggcatgtggacatgatccctcg

SEQ ID NO: 1060 - DNA, 20 bp, Homo sapiens
aggcctgtggctatggggga

SEQ ID NO: 1061 - DNA, 17 bp, Homo sapiens
gggcctgtgggtggggg

SEQ ID NO: 1062 - DNA, 20 bp, Homo sapiens
gggcctgtgggaattaaggg

SEQ ID NO: 1063 - DNA, 21 bp, Homo sapiens
gggcttttggacaccttgggg

SEQ ID NO: 1064 - DNA, 24 bp, Homo sapiens
gggcctgtagggaggagtggggga

SEQ ID NO: 1065 - DNA, 18 bp, Homo sapiens
gcctgtggggctgaggga

SEQ ID NO: 1066 - DNA, 26 bp, Homo sapiens
gggcctgtgaatatagatccctcagg

SEQ ID NO: 1067 - DNA, 19 bp, Homo sapiens
ggcctgtgggcaccccggg

SEQ ID NO: 1068 - DNA, 18 bp, Homo sapiens
gggtctgggacaccctga

SEQ ID NO: 1069 - DNA, 19 bp, Homo sapiens
gggcctgtgcaccgcaggg

SEQ ID NO: 1070 - DNA, 20 bp, Homo sapiens
ggttctgtggggtggaggga

SEQ ID NO: 1071 - DNA, 18 bp, Homo sapiens
aggtctgggccctgaggg

SEQ ID NO: 1072 - DNA, 17 bp, Homo sapiens
gggcctgtgtgcgaggg

SEQ ID NO: 1073 - DNA, 17 bp, Homo sapiens
gcctgtggcagggaggg

SEQ ID NO: 1074 - DNA, 17 bp, Homo sapiens
gggcttgtgggccgggg

SEQ ID NO: 1075 - DNA, 18 bp, Homo sapiens
ggtctgtggacggcagga

SEQ ID NO: 1076 - DNA, 22 bp, Homo sapiens
gggctgttttctatctgaggga

SEQ ID NO: 1077 - DNA, 22 bp, Homo sapiens
ggtcctgtggagacagcgaggg

SEQ ID NO: 1078 - DNA, 15 bp, Homo sapiens
gggcgtacctgaggg

SEQ ID NO: 1079 - DNA, 15 bp, Homo sapiens
gggcctatgggtggg

SEQ ID NO: 1080 - DNA, 19 bp, Homo sapiens
gggcttgtggtcgcgaggg

SEQ ID NO: 1081 - DNA, 18 bp, Homo sapiens
gggtctgagggaggaggg

SEQ ID NO: 1082 - DNA, 18 bp, Homo sapiens
gggcctgagggaggaggg

SEQ ID NO: 1083 - DNA, 19 bp, Homo sapiens
gggcctgaggactgtggga

SEQ ID NO: 1084 - DNA, 17 bp, Homo sapiens
gggcctgctggagaggg

SEQ ID NO: 1085 - DNA, 16 bp, Homo sapiens
aggcaacatctggggg

SEQ ID NO: 1086 - DNA, 20 bp, Homo sapiens
ggccctgtggaccaaaggga

SEQ ID NO: 1087 - DNA, 16 bp, Homo sapiens
gcccgtacctgaggga

SEQ ID NO: 1088 - DNA, 19 bp, Homo sapiens
gggcctgtgggagccaggg

SEQ ID NO: 1089 - DNA, 23 bp, Homo sapiens
aggtttgtggacacatctgggga

SEQ ID NO: 1090 - DNA, 17 bp, Homo sapiens
ggacccctacctgaggg

SEQ ID NO: 1091 - DNA, 21 bp, Homo sapiens
aggcctgtgggtggctccgga

SEQ ID NO: 1092 - DNA, 19 bp, Homo sapiens
gggctgtgtggatggagga

SEQ ID NO: 1093 - DNA, 20 bp, Homo sapiens
gggcctgtggttgggtggga

SEQ ID NO: 1094 - DNA, 14 bp, Homo sapiens
gggcctgtgtgagg

SEQ ID NO: 1095 - DNA, 19 bp, Homo sapiens
aggtctagtgcctgaggga

SEQ ID NO: 1096 - DNA, 19 bp, Homo sapiens
ggccgtggcacctgaggga

SEQ ID NO: 1097 - DNA, 18 bp, Homo sapiens
gggcctgcggagccgggg

SEQ ID NO: 1098 - DNA, 22 bp, Homo sapiens
gggcctgttgtggggtggggga

SEQ ID NO: 1099 - DNA, 17 bp, Homo sapiens
gggccatgtggggaggg

SEQ ID NO: 1100 - DNA, 19 bp, Homo sapiens
gggcctgggacacccggga

SEQ ID NO: 1101 - DNA, 21 bp, Homo sapiens
ggtcctgctgctacctgaggg

SEQ ID NO: 1102 - DNA, 16 bp, Homo sapiens
gggcctgtggtggggg

SEQ ID NO: 1103 - DNA, 21 bp, Homo sapiens
gggcctgtgggggccctgggg

SEQ ID NO: 1104 - DNA, 21 bp, Homo sapiens
gagcctgtgaggtctggggga

SEQ ID NO: 1105 - DNA, 22 bp, Homo sapiens
gggcctgtgaggtgcctgggga

SEQ ID NO: 1106 - DNA, 16 bp, Homo sapiens
aggcctgtggtggggg

SEQ ID NO: 1107 - DNA, 16 bp, Homo sapiens
gggcctgtgagtgggg

SEQ ID NO: 1108 - DNA, 18 bp, Homo sapiens
gggctgtggacaggcgga

SEQ ID NO: 1109 - DNA, 20 bp, Homo sapiens
gggcctgtcaccctgaggga

SEQ ID NO: 1110 - DNA, 17 bp, Homo sapiens
atgtttgtgccatttcc

SEQ ID NO: 1111 - DNA, 19 bp, Homo sapiens
tcagtgtttcttcctttcc

SEQ ID NO: 1112 - DNA, 18 bp, Homo sapiens
tcgctgtttgccgtttcc

SEQ ID NO: 1113 - DNA, 19 bp, Homo sapiens
tcagtgtttctctcttttc

SEQ ID NO: 1114 - DNA, 22 bp, Homo sapiens
tcagtgttgctattcagttttc

SEQ ID NO: 1115 - DNA, 21 bp, Homo sapiens
tcaatgtttgttgggaatttc

SEQ ID NO: 1116 - DNA, 24 bp, Homo sapiens
tcagtgtttgttcagagctcatct

SEQ ID NO: 1117 - DNA, 90 bp, Fowlpox virus
gccagagtctgaaaagtttgtagcctttatgtccgccgcccggcggatcatggacaagagaaaggccaaaaagactatgcaagagttggc

SEQ ID NO: 1118 - DNA, 24 bp, Fowlpox virus
gatcatggacaagagaaaggccaa

SEQ ID NO: 1119 - DNA, 24 bp, Fowlpox virus
tgaaaagtttgtagcctttatgtc

SEQ ID NO: 1120 - DNA, 18 bp, Homo sapiens
cgggcaggagaaaggcca

SEQ ID NO: 1121 - DNA, 18 bp, Homo sapiens
gagcaagagaagggccaa

SEQ ID NO: 1122 - DNA, 21 bp, Homo sapiens
gatcatggaaaccaagggagg

SEQ ID NO: 1123 - DNA, 20 bp, Homo sapiens
tcaggactatcaagaggcca

SEQ ID NO: 1124 - DNA, 21 bp, Homo sapiens
gacatggacactgaggggcca

SEQ ID NO: 1125 - DNA, 14 bp, Homo sapiens
gatcatgggaaagg

SEQ ID NO: 1126 - DNA, 21 bp, Homo sapiens
tggacaaggacgcgaggccaa

SEQ ID NO: 1127 - DNA, 22 bp, Homo sapiens
tggacaaggacggcgaggccaa

SEQ ID NO: 1128 - DNA, 19 bp, Homo sapiens
gaccagcagaggaaggtca

SEQ ID NO: 1129 - DNA, 18 bp, Homo sapiens
cataaacaggagaaaggc

SEQ ID NO: 1130 - DNA, 20 bp, Homo sapiens
atcatggatttgaaaggtca

SEQ ID NO: 1131 - DNA, 24 bp, Homo sapiens
gatcatggttaggctcacggccaa

SEQ ID NO: 1132 - DNA, 22 bp, Homo sapiens
taaaaagtttgtagtaacagtc

SEQ ID NO: 1133 - DNA, 22 bp, Homo sapiens
tgaaaaatgtaatctttgtgtc

SEQ ID NO: 1134 - DNA, 20 bp, Homo sapiens
tgaagagttgtagcccaagt

SEQ ID NO: 1135 - DNA, 16 bp, Homo sapiens
gcttggcttttatgtc

SEQ ID NO: 1136 - DNA, 62 bp, Fowlpox virus
ggaccccagccccgccgatccctcccccagggcgtacccggcttgcctggttctggggctcc

SEQ ID NO: 1137 - DNA, 21 bp, Fowlpox virus
cttgcctggttctggggctcc

SEQ ID NO: 1138 - DNA, 24 bp, Fowlpox virus
accccagccccgccgatccctccc

SEQ ID NO: 1139 - DNA, 20 bp, Homo sapiens
cttagatggttctggggttc

SEQ ID NO: 1140 - DNA, 19 bp, Homo sapiens
tgctccagcctggggctcc

SEQ ID NO: 1141 - DNA, 17 bp, Homo sapiens
tgcctggttctgcctcc

SEQ ID NO: 1142 - DNA, 17 bp, Homo sapiens
cttccacgcctggggct

SEQ ID NO: 1143 - DNA, 19 bp, Homo sapiens
cctgccgggttctggagcc

SEQ ID NO: 1144 - DNA, 20 bp, Homo sapiens
cctgcctgagcctgggctcc

SEQ ID NO: 1145 - DNA, 17 bp, Homo sapiens
tgcttgttttggggctc

SEQ ID NO: 1146 - DNA, 14 bp, Homo sapiens
tgcctggctggctc

SEQ ID NO: 1147 - DNA, 18 bp, Homo sapiens
ttgctggttctgaatgtc

SEQ ID NO: 1148 - DNA, 14 bp, Homo sapiens
tgcctggtgagctc

SEQ ID NO: 1149 - DNA, 17 bp, Homo sapiens
tgcctggggccggctcc

SEQ ID NO: 1150 - DNA, 18 bp, Homo sapiens
cttgcagtccctggggct

SEQ ID NO: 1151 - DNA, 19 bp, Homo sapiens
ctgcctgggactgatgggg

SEQ ID NO: 1152 - DNA, 16 bp, Homo sapiens
gcctggccgaggctcc

SEQ ID NO: 1153 - DNA, 20 bp, Homo sapiens
ctttttggctcacagggctc

SEQ ID NO: 1154 - DNA, 18 bp, Homo sapiens
cttggccgatggggctcc

SEQ ID NO: 1155 - DNA, 18 bp, Homo sapiens
ctggtcacctggggctcc

SEQ ID NO: 1156 - DNA, 20 bp, Homo sapiens
cttgcttggctctgaacact

SEQ ID NO: 1157 - DNA, 18 bp, Homo sapiens
tgcctgtcccagggttcc

SEQ ID NO: 1158 - DNA, 17 bp, Homo sapiens
ttgtttggttctgaccc

SEQ ID NO: 1159 - DNA, 21 bp, Homo sapiens
cttgcctgtgttgggggctcc

SEQ ID NO: 1160 - DNA, 21 bp, Homo sapiens
cttcctgtgcatgggggctcc

SEQ ID NO: 1161 - DNA, 15 bp, Homo sapiens
cttgcctggctcgcc

SEQ ID NO: 1162 - DNA, 18 bp, Homo sapiens
cttccctcacggggctcc

SEQ ID NO: 1163 - DNA, 18 bp, Homo sapiens
cctgccctcatggggctc

SEQ ID NO: 1164 - DNA, 18 bp, Homo sapiens
cctgcctggtttctatcc

SEQ ID NO: 1165 - DNA, 16 bp, Homo sapiens
ctgccttccaggggct

SEQ ID NO: 1166 - DNA, 19 bp, Homo sapiens
tgcttggcactggggctcc

SEQ ID NO: 1167 - DNA, 15 bp, Homo sapiens
cttcctagggggctc

SEQ ID NO: 1168 - DNA, 20 bp, Homo sapiens
tgctccccttctggggctcc

SEQ ID NO: 1169 - DNA, 19 bp, Homo sapiens
ttgttgagacgggggctcc

SEQ ID NO: 1170 - DNA, 16 bp, Homo sapiens
cttcctggttccactc

SEQ ID NO: 1171 - DNA, 19 bp, Homo sapiens
cttggttggttctagattc

SEQ ID NO: 1172 - DNA, 17 bp, Homo sapiens
cttgcctggtgggctcc

SEQ ID NO: 1173 - DNA, 19 bp, Homo sapiens
ctggctactcatggggctc

SEQ ID NO: 1174 - DNA, 18 bp, Homo sapiens
tcgtcctgcttggggctc

SEQ ID NO: 1175 - DNA, 16 bp, Homo sapiens
cttcctcctggggttc

SEQ ID NO: 1176 - DNA, 19 bp, Homo sapiens
ttgtgtggtcgggggctcc

SEQ ID NO: 1177 - DNA, 20 bp, Homo sapiens
tgtttggttctgaaagggtc

SEQ ID NO: 1178 - DNA, 20 bp, Homo sapiens
ttgcttggtcccaggagctc

SEQ ID NO: 1179 - DNA, 20 bp, Homo sapiens
tgcctggcctgggtggggct

SEQ ID NO: 1180 - DNA, 16 bp, Homo sapiens
cctgcggcctggggct

SEQ ID NO: 1181 - DNA, 18 bp, Homo sapiens
cttgtcccctggggctcc

SEQ ID NO: 1182 - DNA, 20 bp, Homo sapiens
ttccctgggacagagggctc

SEQ ID NO: 1183 - DNA, 21 bp, Homo sapiens
cttgcctgatttcttagattc

SEQ ID NO: 1184 - DNA, 18 bp, Homo sapiens
ctggtcttcaggggctcc

SEQ ID NO: 1185 - DNA, 19 bp, Homo sapiens
tgccattacctggggctcc

SEQ ID NO: 1186 - DNA, 20 bp, Homo sapiens
tgccttccccgtggggctcc

SEQ ID NO: 1187 - DNA, 16 bp, Homo sapiens
cttcctgctggggctc

SEQ ID NO: 1188 - DNA, 18 bp, Homo sapiens
ctgctgtggttggggctc

SEQ ID NO: 1189 - DNA, 17 bp, Homo sapiens
cttgcccggaggcggct

SEQ ID NO: 1190 - DNA, 23 bp, Homo sapiens
cttgcctgattcccttcggagcc

SEQ ID NO: 1191 - DNA, 18 bp, Homo sapiens
cttgcccggctacgggct

SEQ ID NO: 1192 - DNA, 15 bp, Homo sapiens
tgtctggagggctcc

SEQ ID NO: 1193 - DNA, 18 bp, Homo sapiens
ctgccactggctggggct

SEQ ID NO: 1194 - DNA, 19 bp, Homo sapiens
cttgactgagaagggctcc

SEQ ID NO: 1195 - DNA, 18 bp, Homo sapiens
ctgtctgccctggggctc

SEQ ID NO: 1196 - DNA, 20 bp, Homo sapiens
cttccctcagtctggggctc

SEQ ID NO: 1197 - DNA, 21 bp, Homo sapiens
cttgcctgttttcacagactc

SEQ ID NO: 1198 - DNA, 22 bp, Homo sapiens
cttcctgggataaaggggttcc

SEQ ID NO: 1199 - DNA, 16 bp, Homo sapiens
ctttcccgttggggct

SEQ ID NO: 1200 - DNA, 14 bp, Homo sapiens
tgcctgggaggctc

SEQ ID NO: 1201 - DNA, 19 bp, Homo sapiens
ctgcctggtttcctgtgct

SEQ ID NO: 1202 - DNA, 17 bp, Homo sapiens
ttgactaaaggggctcc

SEQ ID NO: 1203 - DNA, 18 bp, Homo sapiens
cttccctgaagagggctc

SEQ ID NO: 1204 - DNA, 17 bp, Homo sapiens
gccctgcctggggctcc

SEQ ID NO: 1205 - DNA, 17 bp, Homo sapiens
gcctggttctgggttcc

SEQ ID NO: 1206 - DNA, 20 bp, Homo sapiens
cttgcttggtcctagaatcc

SEQ ID NO: 1207 - DNA, 19 bp, Homo sapiens
ctgcttggttctggagttc

SEQ ID NO: 1208 - DNA, 18 bp, Homo sapiens
ttgtctgcttccaaagtc

SEQ ID NO: 1209 - DNA, 17 bp, Homo sapiens
ctttttggttttggagc

SEQ ID NO: 1210 - DNA, 19 bp, Homo sapiens
cttgttttgttagaactcc

SEQ ID NO: 1211 - DNA, 14 bp, Homo sapiens
cccagcaatccctc

SEQ ID NO: 1212 - DNA, 19 bp, Homo sapiens
agcctgtgcttgatccctc

SEQ ID NO: 1213 - DNA, 20 bp, Homo sapiens
cccccgccccgccgccgcct

SEQ ID NO: 1214 - DNA, 20 bp, Homo sapiens
acccctggtcacattcctcc

SEQ ID NO: 1215 - DNA, 24 bp, Homo sapiens
acctcggttcctccggcccctccc

SEQ ID NO: 1216 - DNA, 22 bp, Homo sapiens
cctccagccttcttgctttccc

SEQ ID NO: 1217 - DNA, 18 bp, Homo sapiens
ccccagccctggccggcc

SEQ ID NO: 1218 - DNA, 17 bp, Homo sapiens
cccccgccccgccgccc

SEQ ID NO: 1219 - DNA, 17 bp, Homo sapiens
ccagaagcatccctccc

SEQ ID NO: 1220 - DNA, 21 bp, Homo sapiens
cccagccctgtccaaggctcc

SEQ ID NO: 1221 - DNA, 18 bp, Homo sapiens
cccccgccccgccgggcc

SEQ ID NO: 1222 - DNA, 19 bp, Homo sapiens
agccccgcctggtccctcc

SEQ ID NO: 1223 - DNA, 24 bp, Homo sapiens
accccaccccccggtccccctccc

SEQ ID NO: 1224 - DNA, 18 bp, Homo sapiens
cccgaccccgctccctcc

SEQ ID NO: 1225 - DNA, 23 bp, Homo sapiens
actccagccccgtctggtgaccc

SEQ ID NO: 1226 - DNA, 21 bp, Homo sapiens
gctccgcgctccttccctccc

SEQ ID NO: 1227 - DNA, 20 bp, Homo sapiens
acctccagttccctcctccc

SEQ ID NO: 1228 - DNA, 21 bp, Homo sapiens
ccccagcctcgaagacctttc

SEQ ID NO: 1229 - DNA, 17 bp, Homo sapiens
ccccatccctccttccc

SEQ ID NO: 1230 - DNA, 19 bp, Homo sapiens
cccagccccggggcctccc

SEQ ID NO: 1231 - DNA, 18 bp, Homo sapiens
ccctgccctgcctcctcc

SEQ ID NO: 1232 - DNA, 16 bp, Homo sapiens
ccccaacctgatccct

SEQ ID NO: 1233 - DNA, 18 bp, Homo sapiens
ccccgccccgccgacacc

SEQ ID NO: 1234 - DNA, 19 bp, Homo sapiens
accccagcccagcgctccc

SEQ ID NO: 1235 - DNA, 18 bp, Homo sapiens
gccccaccctgccctccc

SEQ ID NO: 1236 - DNA, 18 bp, Homo sapiens
ccggccccgccaggtccc

SEQ ID NO: 1237 - DNA, 18 bp, Homo sapiens
ccgcagccccgccgagcc

SEQ ID NO: 1238 - DNA, 24 bp, Homo sapiens
accccggccctcccggcgggctcc

SEQ ID NO: 1239 - DNA, 21 bp, Homo sapiens
gcctccgaggcggtccctccc

SEQ ID NO: 1240 - DNA, 19 bp, Homo sapiens
cagccccaagaattctccc

SEQ ID NO: 1241 - DNA, 16 bp, Homo sapiens
cccagccccgccgcct

SEQ ID NO: 1242 - DNA, 18 bp, Homo sapiens
ccccagccctctcctctc

SEQ ID NO: 1243 - DNA, 16 bp, Homo sapiens
cctggccccgcccctc

SEQ ID NO: 1244 - DNA, 20 bp, Homo sapiens
cctccagcccccatcttctc

SEQ ID NO: 1245 - DNA, 19 bp, Homo sapiens
ccccaaccctggagcctcc

SEQ ID NO: 1246 - DNA, 18 bp, Homo sapiens
ccccacccctgccttccc

SEQ ID NO: 1247 - DNA, 19 bp, Homo sapiens
cccagccctttccccttcc

SEQ ID NO: 1248 - DNA, 19 bp, Homo sapiens
accccaccctcacccttcc

SEQ ID NO: 1249 - DNA, 23 bp, Homo sapiens
ccccacccctgggccttcctccc

SEQ ID NO: 1250 - DNA, 18 bp, Homo sapiens
agccccagccatccctcc

SEQ ID NO: 1251 - DNA, 17 bp, Homo sapiens
cccagccccattctccc

SEQ ID NO: 1252 - DNA, 19 bp, Homo sapiens
acccctgccccaccctccc

SEQ ID NO: 1253 - DNA, 16 bp, Homo sapiens
cccggcccctccctcc

SEQ ID NO: 1254 - DNA, 19 bp, Homo sapiens
ccaactccccttccctccc

SEQ ID NO: 1255 - DNA, 20 bp, Homo sapiens
accccagcccctctgcaccc

SEQ ID NO: 1256 - DNA, 17 bp, Homo sapiens
ccccgcccctttccctc

SEQ ID NO: 1257 - DNA, 24 bp, Homo sapiens
accctgcgggccatggtccctccc

SEQ ID NO: 1258 - DNA, 17 bp, Homo sapiens
agccccgcttcctttcc

SEQ ID NO: 1259 - DNA, 15 bp, Homo sapiens
cccatcccgcctccc

SEQ ID NO: 1260 - DNA, 18 bp, Homo sapiens
gccccgccccatctctcc

SEQ ID NO: 1261 - DNA, 17 bp, Homo sapiens
ccccagccccactccct

SEQ ID NO: 1262 - DNA, 25 bp, Homo sapiens
accccagccctgctatgtttcctcc

SEQ ID NO: 1263 - DNA, 21 bp, Homo sapiens
cccttggctcccttccctccc

SEQ ID NO: 1264 - DNA, 18 bp, Homo sapiens
gccccgcccttctcctcc

SEQ ID NO: 1265 - DNA, 20 bp, Homo sapiens
accacagccccctccccctc

SEQ ID NO: 1266 - DNA, 21 bp, Homo sapiens
accccacctcctgcccctccc

SEQ ID NO: 1267 - DNA, 20 bp, Homo sapiens
cagctcgggtggtccctccc

SEQ ID NO: 1268 - DNA, 21 bp, Homo sapiens
ccccagctccagccccatctc

SEQ ID NO: 1269 - DNA, 20 bp, Homo sapiens
accccagccatgcctctccc

SEQ ID NO: 1270 - DNA, 20 bp, Homo sapiens
cctcagccccgttgctctcc

SEQ ID NO: 1271 - DNA, 17 bp, Homo sapiens
cccagcccttcccctcc

SEQ ID NO: 1272 - DNA, 20 bp, Homo sapiens
ccccagccccgccgtcgctc

SEQ ID NO: 1273 - DNA, 20 bp, Homo sapiens
accccagccctcactccacc

SEQ ID NO: 1274 - DNA, 18 bp, Homo sapiens
cctcgccccacctcctcc

SEQ ID NO: 1275 - DNA, 20 bp, Homo sapiens
accccagcctgcactctctc

SEQ ID NO: 1276 - DNA, 21 bp, Homo sapiens
gctctagccaaagtccctccc

SEQ ID NO: 1277 - DNA, 18 bp, Homo sapiens
ccccagctcccaagtccc

SEQ ID NO: 1278 - DNA, 21 bp, Homo sapiens
ccccagcccccgccgtggctc

SEQ ID NO: 1279 - DNA, 23 bp, Homo sapiens
ccccagccctccctcaagctccc

SEQ ID NO: 1280 - DNA, 22 bp, Homo sapiens
cctcagctccgccttccctccc

SEQ ID NO: 1281 - DNA, 19 bp, Homo sapiens
agcctggtcccacccctcc

SEQ ID NO: 1282 - DNA, 16 bp, Homo sapiens
accccacccccccctc

SEQ ID NO: 1283 - DNA, 18 bp, Homo sapiens
ccccagcctgcctgctcc

SEQ ID NO: 1284 - DNA, 22 bp, Homo sapiens
ccccggccccgagagacttctc

SEQ ID NO: 1285 - DNA, 18 bp, Homo sapiens
accccagccccctccatc

SEQ ID NO: 1286 - DNA, 20 bp, Homo sapiens
cccagccccgcctgggtctc

SEQ ID NO: 1287 - DNA, 18 bp, Homo sapiens
ccctgcccccgccggccc

SEQ ID NO: 1288 - DNA, 17 bp, Homo sapiens
accccagctccccgacc

SEQ ID NO: 1289 - DNA, 18 bp, Homo sapiens
ccccgaccccgccggccc

SEQ ID NO: 1290 - DNA, 17 bp, Homo sapiens
ccccagcctcgccgccc

SEQ ID NO: 1291 - DNA, 16 bp, Homo sapiens
cccagccccggccctc

SEQ ID NO: 1292 - DNA, 17 bp, Homo sapiens
agccccaaatccctccc

SEQ ID NO: 1293 - DNA, 21 bp, Homo sapiens
cctctggccccgccgccgcct

SEQ ID NO: 1294 - DNA, 20 bp, Homo sapiens
accccaaccctaccccttcc

SEQ ID NO: 1295 - DNA, 19 bp, Homo sapiens
ccccgcctccgcgcttccc

SEQ ID NO: 1296 - DNA, 18 bp, Homo sapiens
accccggctcctcatccc

SEQ ID NO: 1297 - DNA, 21 bp, Homo sapiens
ccccagctccctccccctccc

SEQ ID NO: 1298 - DNA, 20 bp, Homo sapiens
ccccaggcccagttcctccc

SEQ ID NO: 1299 - DNA, 21 bp, Homo sapiens
cccagcccctgttgttctctc

SEQ ID NO: 1300 - DNA, 17 bp, Homo sapiens
ccctgcccagtccctcc

SEQ ID NO: 1301 - DNA, 17 bp, Homo sapiens
cccagccctgacacctc

SEQ ID NO: 1302 - DNA, 18 bp, Homo sapiens
cccagccctgccccttcc

SEQ ID NO: 1303 - DNA, 18 bp, Homo sapiens
accccaccctgctctctc

SEQ ID NO: 1304 - DNA, 15 bp, Homo sapiens
ccgaccccgctccct

SEQ ID NO: 1305 - DNA, 24 bp, Homo sapiens
cctcggcctcccccgtggcctccc

SEQ ID NO: 1306 - DNA, 21 bp, Homo sapiens
ccccagcccctcagctcctcc

SEQ ID NO: 1307 - DNA, 25 bp, Homo sapiens
accccagccccagcccctcagctcc

SEQ ID NO: 1308 - DNA, 18 bp, Homo sapiens
cctcagctccgccgaccc

SEQ ID NO: 1309 - DNA, 19 bp, Homo sapiens
cagtcaccatccccctccc

SEQ ID NO: 1310 - DNA, 20 bp, Homo sapiens
cccggccccgatcccctccc

SEQ ID NO: 1311 - DNA, 21 bp, Homo sapiens
cctccggctccttcccctccc

SEQ ID NO: 1312 - DNA, 17 bp, Homo sapiens
ccccgccccggcctccc

SEQ ID NO: 1313 - DNA, 22 bp, Homo sapiens
ccccacccccccgacatccctc

SEQ ID NO: 1314 - DNA, 20 bp, Homo sapiens
cctcagctctgtcccctccc

SEQ ID NO: 1315 - DNA, 20 bp, Homo sapiens
ccccatctccactcccttcc

SEQ ID NO: 1316 - DNA, 23 bp, Homo sapiens
cccccgccccgcccccgcctccc

SEQ ID NO: 1317 - DNA, 16 bp, Homo sapiens
cagcgcgatccctccc

SEQ ID NO: 1318 - DNA, 21 bp, Homo sapiens
accccgcccttgctgtttctc

SEQ ID NO: 1319 - DNA, 17 bp, Homo sapiens
ccccaaccccttttccc

SEQ ID NO: 1320 - DNA, 20 bp, Homo sapiens
ccccggccccttcccctccc

SEQ ID NO: 1321 - DNA, 20 bp, Homo sapiens
cccaagcttagctccctccc

SEQ ID NO: 1322 - DNA, 20 bp, Homo sapiens
ccccagcaccaatccttccc

SEQ ID NO: 1323 - DNA, 22 bp, Homo sapiens
ccccagccccaaatcccctccc

SEQ ID NO: 1324 - DNA, 21 bp, Homo sapiens
gcccttgcctccttccctccc

SEQ ID NO: 1325 - DNA, 22 bp, Homo sapiens
cccagccctgccccatcacctc

SEQ ID NO: 1326 - DNA, 17 bp, Homo sapiens
accccagccttcctccc

SEQ ID NO: 1327 - DNA, 18 bp, Homo sapiens
ccaggccctgcccctccc

SEQ ID NO: 1328 - DNA, 17 bp, Homo sapiens
ccccagccttccttccc

SEQ ID NO: 1329 - DNA, 19 bp, Homo sapiens
ccccggccccgcccggccc

SEQ ID NO: 1330 - DNA, 16 bp, Homo sapiens
ccggctccgtccctcc

SEQ ID NO: 1331 - DNA, 17 bp, Homo sapiens
accccagccttccctcc

SEQ ID NO: 1332 - DNA, 23 bp, Homo sapiens
accccagcttcccctcatttccc

SEQ ID NO: 1333 - DNA, 19 bp, Homo sapiens
gccctgggtccaacccctc

SEQ ID NO: 1334 - DNA, 18 bp, Homo sapiens
ccccagttccgcactccc

SEQ ID NO: 1335 - DNA, 28 bp, Homo sapiens
accccagcccagctgaagacggctctcc

SEQ ID NO: 1336 - DNA, 21 bp, Homo sapiens
accccacctcggactcctccc

SEQ ID NO: 1337 - DNA, 23 bp, Homo sapiens
accccagcttagtttcgattctc

SEQ ID NO: 1338 - DNA, 21 bp, Homo sapiens
gccccgcgctctgcccctccc

SEQ ID NO: 1339 - DNA, 18 bp, Homo sapiens
ccctagctcctcccctcc

SEQ ID NO: 1340 - DNA, 22 bp, Homo sapiens
ccccagccttttcggtctctcc

SEQ ID NO: 1341 - DNA, 21 bp, Homo sapiens
agccccagggtggtcccttcc

SEQ ID NO: 1342 - DNA, 23 bp, Homo sapiens
ccccagctgctccacctccttcc

SEQ ID NO: 1343 - DNA, 23 bp, Homo sapiens
accccaggcctgagaactcctcc

SEQ ID NO: 1344 - DNA, 16 bp, Homo sapiens
accccagcgcctccct

SEQ ID NO: 1345 - DNA, 21 bp, Homo sapiens
ccccagcctcccgcagagtcc

SEQ ID NO: 1346 - DNA, 16 bp, Homo sapiens
ccagcccatcccctcc

SEQ ID NO: 1347 - DNA, 15 bp, Homo sapiens
ccagccccctcctcc

SEQ ID NO: 1348 - DNA, 23 bp, Homo sapiens
ccccagcccaggctgtttctccc

SEQ ID NO: 1349 - DNA, 16 bp, Homo sapiens
ccagccccagccctcc

SEQ ID NO: 1350 - DNA, 20 bp, Homo sapiens
ccccaccccaatccccttcc

SEQ ID NO: 1351 - DNA, 19 bp, Homo sapiens
accccagcacctctctctc

SEQ ID NO: 1352 - DNA, 15 bp, Homo sapiens
ccccagcccctccct

SEQ ID NO: 1353 - DNA, 22 bp, Homo sapiens
accccgctccgtttggcttccc

SEQ ID NO: 1354 - DNA, 18 bp, Homo sapiens
acccttgccccgccctcc

SEQ ID NO: 1355 - DNA, 19 bp, Homo sapiens
gcccagctgggtccctccc

SEQ ID NO: 1356 - DNA, 19 bp, Homo sapiens
ccccagttccgtcattccc

SEQ ID NO: 1357 - DNA, 16 bp, Homo sapiens
cccggccccgcctccc

SEQ ID NO: 1358 - DNA, 20 bp, Homo sapiens
ccccagccctgtctcctccc

SEQ ID NO: 1359 - DNA, 22 bp, Homo sapiens
cctcgccccgccatgtccttcc

SEQ ID NO: 1360 - DNA, 19 bp, Homo sapiens
cctctggctccctccctcc

SEQ ID NO: 1361 - DNA, 23 bp, Homo sapiens
actccagcccctccaggggtctc

SEQ ID NO: 1362 - DNA, 21 bp, Homo sapiens
cctcagctctgccagtccctc

SEQ ID NO: 1363 - DNA, 22 bp, Homo sapiens
accccacccgaggctccctccc

SEQ ID NO: 1364 - DNA, 18 bp, Homo sapiens
accccaccccaccccctc

SEQ ID NO: 1365 - DNA, 17 bp, Homo sapiens
accccaccccctctccc

SEQ ID NO: 1366 - DNA, 23 bp, Homo sapiens
ccccggccccgcctccgcctccc

SEQ ID NO: 1367 - DNA, 23 bp, Homo sapiens
cctacccctcctgcattcttccc

SEQ ID NO: 1368 - DNA, 24 bp, Homo sapiens
accccagctcctgccgggagagcc

SEQ ID NO: 1369 - DNA, 19 bp, Homo sapiens
cctcagctccctcccttcc

SEQ ID NO: 1370 - DNA, 19 bp, Homo sapiens
ccaactccttctccctccc

SEQ ID NO: 1371 - DNA, 15 bp, Homo sapiens
gccccgccgccgccc

SEQ ID NO: 1372 - DNA, 16 bp, Homo sapiens
gccccgccgctctccc

SEQ ID NO: 1373 - DNA, 19 bp, Homo sapiens
actccgcccctgtccctcc

SEQ ID NO: 1374 - DNA, 24 bp, Homo sapiens
ccccagcccttctcctggttcctc

SEQ ID NO: 1375 - DNA, 20 bp, Homo sapiens
ccccaccccacctctcttcc

SEQ ID NO: 1376 - DNA, 17 bp, Homo sapiens
ccggccgccgactctcc

SEQ ID NO: 1377 - DNA, 18 bp, Homo sapiens
ccccagcccgctgtttcc

SEQ ID NO: 1378 - DNA, 17 bp, Homo sapiens
cctacccctcctccctc

SEQ ID NO: 1379 - DNA, 17 bp, Homo sapiens
cccagccccagccctcc

SEQ ID NO: 1380 - DNA, 23 bp, Homo sapiens
ccccagccctcccttgatttctc

SEQ ID NO: 1381 - DNA, 20 bp, Homo sapiens
ccccagccctcaggcctttc

SEQ ID NO: 1382 - DNA, 19 bp, Homo sapiens
cccacccctcccccctccc

SEQ ID NO: 1383 - DNA, 21 bp, Homo sapiens
cccggttcccactcccctccc

SEQ ID NO: 1384 - DNA, 15 bp, Homo sapiens
ccagcccctccctcc

SEQ ID NO: 1385 - DNA, 22 bp, Homo sapiens
ccctggccccaccggggggccc

SEQ ID NO: 1386 - DNA, 18 bp, Homo sapiens
acccttggccatccctcc

SEQ ID NO: 1387 - DNA, 20 bp, Homo sapiens
ccccacccctcatgctctcc

SEQ ID NO: 1388 - DNA, 20 bp, Homo sapiens
accccagccctccggggcct

SEQ ID NO: 1389 - DNA, 19 bp, Homo sapiens
cccagccccacatctctcc

SEQ ID NO: 1390 - DNA, 21 bp, Homo sapiens
accccaccccgtcttgttccc

SEQ ID NO: 1391 - DNA, 21 bp, Homo sapiens
cctccagcccccgcccctccc

SEQ ID NO: 1392 - DNA, 18 bp, Homo sapiens
accctgccccccccctcc

SEQ ID NO: 1393 - DNA, 19 bp, Homo sapiens
ccggtccctcccccctccc

SEQ ID NO: 1394 - DNA, 20 bp, Homo sapiens
cctgtcccgggcacccctcc

SEQ ID NO: 1395 - DNA, 20 bp, Homo sapiens
cccggcccccgccccctccc

SEQ ID NO: 1396 - DNA, 17 bp, Homo sapiens
ccccagcccctccttcc

SEQ ID NO: 1397 - DNA, 73 bp, Fowlpox virus
agttttgccacaacaagcctactgtcaacacgatgggagtggagagcgcagtgaccgggctggtggcagagct

SEQ ID NO: 1398 - DNA, 24 bp, Fowlpox virus
aagcctactgtcaacacgatggga

SEQ ID NO: 1399 - DNA, 24 bp, Fowlpox virus
ggagagcgcagtgaccgggctggt

SEQ ID NO: 1400 - DNA, 16 bp, Homo sapiens
aagcccaccatggtgg

SEQ ID NO: 1401 - DNA, 20 bp, Homo sapiens
agctcatatactacgatggg

SEQ ID NO: 1402 - DNA, 23 bp, Homo sapiens
aagtttactgtcaaaaagaggga

SEQ ID NO: 1403 - DNA, 22 bp, Homo sapiens
agctttactgtcagtcagtgga

SEQ ID NO: 1404 - DNA, 18 bp, Homo sapiens
aaggctactgtcaatgca

SEQ ID NO: 1405 - DNA, 17 bp, Homo sapiens
tactgtcaagtttggga

SEQ ID NO: 1406 - DNA, 22 bp, Homo sapiens
aagttactgtcaggtgatggga

SEQ ID NO: 1407 - DNA, 20 bp, Homo sapiens
agccactgtcggggatcggg

SEQ ID NO: 1408 - DNA, 17 bp, Homo sapiens
agctggctgtcaacaga

SEQ ID NO: 1409 - DNA, 19 bp, Homo sapiens
ggagagccagtgagggtgg

SEQ ID NO: 1410 - DNA, 22 bp, Homo sapiens
ggagagtggaggaggggctggt

SEQ ID NO: 1411 - DNA, 19 bp, Homo sapiens
ggagagcgtggtgttaaag

SEQ ID NO: 1412 - DNA, 19 bp, Homo sapiens
ggaggtgcaaagggctggt

SEQ ID NO: 1413 - DNA, 18 bp, Homo sapiens
ggagagcgcggggcgcgg

SEQ ID NO: 1414 - DNA, 22 bp, Homo sapiens
ggagagcgtggtgtctggaggt

SEQ ID NO: 1415 - DNA, 23 bp, Homo sapiens
gggggcccagccccagggctggt

SEQ ID NO: 1416 - DNA, 21 bp, Homo sapiens
ggatggcactgtcgggctggt

SEQ ID NO: 1417 - DNA, 25 bp, Homo sapiens
agagagcgtggagcgatgggctggt

SEQ ID NO: 1418 - DNA, 19 bp, Homo sapiens
ggagggcctggcaggctgg

SEQ ID NO: 1419 - DNA, 21 bp, Homo sapiens
ggagagaggtaccgggctggt

SEQ ID NO: 1420 - DNA, 18 bp, Homo sapiens
ggagggcgcagtgtctgg

SEQ ID NO: 1421 - DNA, 19 bp, Homo sapiens
ggaagtcatactgggctgg

SEQ ID NO: 1422 - DNA, 18 bp, Homo sapiens
gggagcaggccgggctgg

SEQ ID NO: 1423 - DNA, 22 bp, Homo sapiens
ggtgggcgcgcggggggctggt

SEQ ID NO: 1424 - DNA, 21 bp, Homo sapiens
gagagcgcgaacagggctggt

SEQ ID NO: 1425 - DNA, 19 bp, Homo sapiens
gaccgatggttgggctggt

SEQ ID NO: 1426 - DNA, 95 bp, Fowlpox virus
ggctcgttaaacccgccgtgggcatggacaccctgtacggcaccaggaacgccaggttcgtacccagggacgtcggacggtggggaaagggagct

SEQ ID NO: 1427 - DNA, 24 bp, Fowlpox virus
accctgtacggcaccaggaacgcc

SEQ ID NO: 1428 - DNA, 24 bp, Fowlpox virus
ttcgtacccagggacgtcggacgg

SEQ ID NO: 1429 - DNA, 24 bp, Homo sapiens
ccctgtgtctgctttgggaacgcc

SEQ ID NO: 1430 - DNA, 21 bp, Homo sapiens
ccgtggctcgccgggagcgcc

SEQ ID NO: 1431 - DNA, 19 bp, Homo sapiens
cctgtgctgcagtggacgc

SEQ ID NO: 1432 - DNA, 17 bp, Homo sapiens
accctgtacggcatggg

SEQ ID NO: 1433 - DNA, 23 bp, Homo sapiens
actctgtacaggtggttccacgc

SEQ ID NO: 1434 - DNA, 23 bp, Homo sapiens
ccttgtggtcagggaggaacgcc

SEQ ID NO: 1435 - DNA, 20 bp, Homo sapiens
ccctgtaccgcatcgtggcc

SEQ ID NO: 1436 - DNA, 16 bp, Homo sapiens
cctgcaccaggagtgc

SEQ ID NO: 1437 - DNA, 18 bp, Homo sapiens
gtcccagggatggcccag

SEQ ID NO: 1438 - DNA, 25 bp, Homo sapiens
ttcgggcccagggacgacgcagcgg

SEQ ID NO: 1439 - DNA, 90 bp, Fowlpox virus
gagatttaatgctagtctaaatatttctatattaagatactatcttaagatatcggtactctgagatattttacgctgacatttttactc

SEQ ID NO: 1440 - DNA, 24 bp, Fowlpox virus
tattttacgctgacatttttactc

SEQ ID NO: 1441 - DNA, 24 bp, Fowlpox virus
tctaaatatttctatattaagata

SEQ ID NO: 1442 - DNA, 19 bp, Homo sapiens
tattttacctgacaaattc

SEQ ID NO: 1443 - DNA, 18 bp, Homo sapiens
tatcttacgctgatattc

SEQ ID NO: 1444 - DNA, 23 bp, Homo sapiens
taaatattttcaacattaagata

SEQ ID NO: 1445 - DNA, 21 bp, Homo sapiens
tctaaaaaaatatattaagat

SEQ ID NO: 1446 - DNA, 23 bp, Homo sapiens
tcaaaatatttctacataagata

SEQ ID NO: 1447 - DNA, 97 bp, Fowlpox virus
ggccgccgcctcgaggtggctcgcgtcgccatggagaccgagacccgtcaatcagcggtcaccatggcgacgcgagcccgcctccgagtccgcggcc

SEQ ID NO: 1448 - DNA, 24 bp, Fowlpox virus
caccatggcgacgcgagcccgcct

SEQ ID NO: 1449 - DNA, 24 bp, Fowlpox virus
tcgcgtcgccatggagaccgagac

SEQ ID NO: 1450 - DNA, 26 bp, Homo sapiens
cgcgtcgccatggagcccgacgggac

SEQ ID NO: 1451 - DNA, 23 bp, Homo sapiens
tcgtggcgctcacgtgaccgaga

SEQ ID NO: 1452 - DNA, 92 bp, Amsacta moorei entomopoxvirus
aattcattagaattgattttattagaatgagttatttcttcatccgaagattcaacatcatctttttttttcttaatttctattctagaatt

SEQ ID NO: 1453 - DNA, 24 bp, Amsacta moorei entomopoxvirus
ttcattagaattgattttattaga

SEQ ID NO: 1454 - DNA, 24 bp, Amsacta moorei entomopoxvirus
ttcaacatcatctttttttttctt

SEQ ID NO: 1455 - DNA, 21 bp, Homo sapiens
ttcaatttcctcttttttttt

SEQ ID NO: 1456 - DNA, 19 bp, Homo sapiens
ctcaacacgcttttttttt

SEQ ID NO: 1457 - DNA, 23 bp, Homo sapiens
ttcagcatcacctgccacttctt

SEQ ID NO: 1458 - DNA, 21 bp, Homo sapiens
ttcaacatcttcttttccctt

SEQ ID NO: 1459 - DNA, 21 bp, Homo sapiens
ttcaacatctgtcattttttt

SEQ ID NO: 1460 - DNA, 21 bp, Homo sapiens
ttcacatcaatccttttttct

SEQ ID NO: 1461 - DNA, 119 bp, Amsacta moorei entomopoxvirus
agaatcttcttctaattcattagaattgattttattagaatgagttatttcttcatccgaagattcaacatcatctttttttttcttaatttctattctagaattttttttattattct

SEQ ID NO: 1462 - DNA, 24 bp, Amsacta moorei entomopoxvirus
caacatcatctttttttttcttaa

SEQ ID NO: 1463 - DNA, 21 bp, Homo sapiens
cattttcctttattttcttaa

SEQ ID NO: 1464 - DNA, 18 bp, Homo sapiens
catcattattttttttcc

SEQ ID NO: 1465 - DNA, 22 bp, Homo sapiens
aactcatctggtgttttcttaa

SEQ ID NO: 1466 - DNA, 19 bp, Homo sapiens
catcatcattttctttctt

SEQ ID NO: 1467 - DNA, 19 bp, Homo sapiens
caacatcttcttttccctt

SEQ ID NO: 1468 - DNA, 25 bp, Homo sapiens
aacatccttttatatcctttcttaa

SEQ ID NO: 1469 - DNA, 22 bp, Homo sapiens
acagccattttttttttcttaa

SEQ ID NO: 1470 - DNA, 21 bp, Homo sapiens
cagcatcctcttaattcttaa

SEQ ID NO: 1471 - DNA, 19 bp, Homo sapiens
catcattctttttccccaa

SEQ ID NO: 1472 - DNA, 68 bp, Amsacta moorei entomopoxvirus
attttaggatcattaaaattatttttacacttaaatttaattttatcaattttttcagattttaaaat

SEQ ID NO: 1473 - DNA, 24 bp, Amsacta moorei entomopoxvirus
taggatcattaaaattatttttac

SEQ ID NO: 1474 - DNA, 24 bp, Amsacta moorei entomopoxvirus
tttatcaattttttcagattttaa

SEQ ID NO: 1475 - DNA, 22 bp, Homo sapiens
ggatcatcaagaactaagttac

SEQ ID NO: 1476 - DNA, 23 bp, Homo sapiens
aggaagactaggattatttttac

SEQ ID NO: 1477 - DNA, 68 bp, Amsacta moorei entomopoxvirus
gaagtccacggttcctaaggcctttttaccatgttttgatgaaaacgccacggaaatcgatctgcttt

SEQ ID NO: 1478 - DNA, 24 bp, Amsacta moorei entomopoxvirus
tgaaaacgccacggaaatcgatct

SEQ ID NO: 1479 - DNA, 24 bp, Amsacta moorei entomopoxvirus
tccacggttcctaaggccttttta

SEQ ID NO: 1480 - DNA, 16 bp, Homo sapiens
caggttttgccttttt

SEQ ID NO: 1481 - DNA, 22 bp, Homo sapiens
catgtttcccaaagctttttta

SEQ ID NO: 1482 - DNA, 15 bp, Homo sapiens
tccacggtgcttttt

SEQ ID NO: 1483 - DNA, 20 bp, Homo sapiens
tctgcggtccctaagggctt

SEQ ID NO: 1484 - DNA, 16 bp, Homo sapiens
cacggttcgctttttt

SEQ ID NO: 1485 - DNA, 20 bp, Homo sapiens
agctctctggggccttttta

SEQ ID NO: 1486 - DNA, 20 bp, Homo sapiens
cacggttcctggtccctttt

SEQ ID NO: 1487 - DNA, 62 bp, Amsacta moorei entomopoxvirus
gaaaataaatgacggatatgatgtgaatgatatatcgtcatcgatatacgtggtttcttatc

SEQ ID NO: 1488 - DNA, 24 bp, Amsacta moorei entomopoxvirus
taaatgacggatatgatgtgaatg

SEQ ID NO: 1489 - DNA, 24 bp, Amsacta moorei entomopoxvirus
catcgatatacgtggtttcttatc

SEQ ID NO: 1490 - DNA, 20 bp, Homo sapiens
tcgctgtgcagcctcttatc

SEQ ID NO: 1491 - DNA, 17 bp, Homo sapiens
cattgatatcatagtct

SEQ ID NO: 1492 - DNA, 23 bp, Homo sapiens
cattaatataaattttttcttat

SEQ ID NO: 1493 - DNA, 70 bp, Amsacta moorei entomopoxvirus
gttattggctctaattagtcataaaagtacaacaatacagtatgcgaccactgaaatagagctaaaaaac

SEQ ID NO: 1494 - DNA, 19 bp, Amsacta moorei entomopoxvirus
tgaaatagagctaaaaaac

SEQ ID NO: 1495 - DNA, 24 bp, Amsacta moorei entomopoxvirus
tattggctctaattagtcataaaa

SEQ ID NO: 1496 - DNA, 17 bp, Homo sapiens
tgaaagagccaaaaaac

SEQ ID NO: 1497 - DNA, 19 bp, Homo sapiens
tgggacagagctctaaaac

SEQ ID NO: 1498 - DNA, 18 bp, Homo sapiens
taaaatagaaccacaaaa

SEQ ID NO: 1499 - DNA, 17 bp, Homo sapiens
tgaaaagagcaaaaaac

SEQ ID NO: 1500 - DNA, 18 bp, Homo sapiens
gaaatagaagcctaaaaa

SEQ ID NO: 1501 - DNA, 19 bp, Homo sapiens
tggcactaagctaaaaaac

SEQ ID NO: 1502 - DNA, 18 bp, Homo sapiens
tgaaatagaaccacaaaa

SEQ ID NO: 1503 - DNA, 19 bp, Homo sapiens
tgaaacagtactgaaaaac

SEQ ID NO: 1504 - DNA, 16 bp, Homo sapiens
ttggctttgccataaa

SEQ ID NO: 1505 - DNA, 17 bp, Homo sapiens
gctctgatgtcataaaa

SEQ ID NO: 1506 - DNA, 18 bp, Homo sapiens
tattggctgctgatcaat

SEQ ID NO: 1507 - DNA, 22 bp, Homo sapiens
cattggctttaaaagagcataa

SEQ ID NO: 1508 - DNA, 60 bp, Amsacta moorei entomopoxvirus
gtttccgcttttcagcgagcatgtaccctaatgggaatgcgatggctgttagtgcgggac

SEQ ID NO: 1509 - DNA, 24 bp, Amsacta moorei entomopoxvirus
gaatgcgatggctgttagtgcggg

SEQ ID NO: 1510 - DNA, 24 bp, Amsacta moorei entomopoxvirus
ttccgcttttcagcgagcatgtac

SEQ ID NO: 1511 - DNA, 18 bp, Homo sapiens
gagtgcgagggggtgcgg

SEQ ID NO: 1512 - DNA, 21 bp, Homo sapiens
atgcgacggttggccaacggg

SEQ ID NO: 1513 - DNA, 21 bp, Homo sapiens
gagtgcgatgctgggagtggg

SEQ ID NO: 1514 - DNA, 21 bp, Homo sapiens
tgtgatggccacctgtgtggg

SEQ ID NO: 1515 - DNA, 21 bp, Homo sapiens
ttcctgtttttcggcggctgc

SEQ ID NO: 1516 - DNA, 16 bp, Homo sapiens
gcttttcaataatgta

SEQ ID NO: 1517 - DNA, 24 bp, Homo sapiens
ttctgcttctcatcaagggcatgt

SEQ ID NO: 1518 - DNA, 24 bp, Homo sapiens
ttctgcttctcatcatgggcatgt

SEQ ID NO: 1519 - DNA, 21 bp, Homo sapiens
ttctgctttgtgcacatgtac

SEQ ID NO: 1520 - DNA, 21 bp, Homo sapiens
ttcccttttcagtcctgtgta

SEQ ID NO: 1521 - DNA, 16 bp, Homo sapiens
gctttcttagcatgta

SEQ ID NO: 1522 - DNA, 72 bp, Amsacta moorei entomopoxvirus
agtacttgaaatacagcccctagaaaaatcaaaagtatttcttgaaaaactaaaacctgtagaacaaaaact

SEQ ID NO: 1523 - DNA, 24 bp, Amsacta moorei entomopoxvirus
aaaaactaaaacctgtagaacaaa

SEQ ID NO: 1524 - DNA, 24 bp, Amsacta moorei entomopoxvirus
aatacagcccctagaaaaatcaaa

SEQ ID NO: 1525 - DNA, 19 bp, Homo sapiens
aaaaaccaaaacaaaacaa

SEQ ID NO: 1526 - DNA, 18 bp, Homo sapiens
aaaaactaaaacctgaaa

SEQ ID NO: 1527 - DNA, 22 bp, Homo sapiens
aaaaacaaaaacccagaggcag

SEQ ID NO: 1528 - DNA, 20 bp, Homo sapiens
aaactgaaaactagaacaaa

SEQ ID NO: 1529 - DNA, 18 bp, Homo sapiens
aaaaacaaaaccgaacaa

SEQ ID NO: 1530 - DNA, 21 bp, Homo sapiens
aaaaccaaaactgtctataaa

SEQ ID NO: 1531 - DNA, 20 bp, Homo sapiens
aaaactaaaatccagagcag

SEQ ID NO: 1532 - DNA, 19 bp, Homo sapiens
aaaactgcactgtagagca

SEQ ID NO: 1533 - DNA, 17 bp, Homo sapiens
aaaaacaaaacctgaaa

SEQ ID NO: 1534 - DNA, 21 bp, Homo sapiens
aaaaacaaaccaaggaacaaa

SEQ ID NO: 1535 - DNA, 18 bp, Homo sapiens
aaaaccaaaacaaaacaa

SEQ ID NO: 1536 - DNA, 22 bp, Homo sapiens
aaaaacaaaaccaagaaacaaa

SEQ ID NO: 1537 - DNA, 22 bp, Homo sapiens
aaaaactaaaaattcctggcag

SEQ ID NO: 1538 - DNA, 19 bp, Homo sapiens
aaaactaaaacactctaaa

SEQ ID NO: 1539 - DNA, 19 bp, Homo sapiens
aaaaaccaaaactgagcag

SEQ ID NO: 1540 - DNA, 19 bp, Homo sapiens
aaaaacaaaaacccacaaa

SEQ ID NO: 1541 - DNA, 23 bp, Homo sapiens
aaagactgtggaatgtagaacaa

SEQ ID NO: 1542 - DNA, 16 bp, Homo sapiens
actaaaccagaacaaa

SEQ ID NO: 1543 - DNA, 22 bp, Homo sapiens
aaaagctaaaacctcagcacaa

SEQ ID NO: 1544 - DNA, 19 bp, Homo sapiens
aaaaacaaaagcccacaga

SEQ ID NO: 1545 - DNA, 23 bp, Homo sapiens
aaaatcaaaaccaaaaaaacaaa

SEQ ID NO: 1546 - DNA, 18 bp, Homo sapiens
gaaaaatatgtagaacaa

SEQ ID NO: 1547 - DNA, 26 bp, Homo sapiens
ggaaaccaaaactacctccgaacaaa

SEQ ID NO: 1548 - DNA, 17 bp, Homo sapiens
caaccctagaaagatca

SEQ ID NO: 1549 - DNA, 15 bp, Homo sapiens
cagcccctgaagtca

SEQ ID NO: 1550 - DNA, 19 bp, Homo sapiens
tacaccccattaaatcaaa

SEQ ID NO: 1551 - DNA, 16 bp, Homo sapiens
aataaagcccaaatca

SEQ ID NO: 1552 - DNA, 18 bp, Homo sapiens
atacagcctctatttcaa

SEQ ID NO: 1553 - DNA, 15 bp, Homo sapiens
atacagcctcagtca

SEQ ID NO: 1554 - DNA, 17 bp, Homo sapiens
gcccctttgaaatcaaa

SEQ ID NO: 1555 - DNA, 18 bp, Homo sapiens
aacacacagaaaaatcaa

SEQ ID NO: 1556 - DNA, 18 bp, Homo sapiens
acagcccctgctctcaaa

SEQ ID NO: 1557 - DNA, 20 bp, Homo sapiens
atacatgggggaaaaatcaa

SEQ ID NO: 1558 - DNA, 19 bp, Homo sapiens
aacccctagagaaatcaaa

SEQ ID NO: 1559 - DNA, 25 bp, Homo sapiens
aatacagcatggattagaaatcaaa

SEQ ID NO: 1560 - DNA, 70 bp, Amsacta moorei entomopoxvirus
atagaaaaagataagaggatcgattaagcaaaataaaactatggtgctcttggtcaatttcggtttctat

SEQ ID NO: 1561 - DNA, 24 bp, Amsacta moorei entomopoxvirus
ctcttggtcaatttcggtttctat

SEQ ID NO: 1562 - DNA, 24 bp, Amsacta moorei entomopoxvirus
agaggatcgattaagcaaaataaa

SEQ ID NO: 1563 - DNA, 16 bp, Homo sapiens
ggatcaactgcagaat

SEQ ID NO: 1564 - DNA, 20 bp, Homo sapiens
agagatttaaagcaaaataa

SEQ ID NO: 1565 - DNA, 16 bp, Homo sapiens
agagggatgcaaaata

SEQ ID NO: 1566 - DNA, 24 bp, Homo sapiens
aaggattgacccaagcaaaataaa

SEQ ID NO: 1567 - DNA, 21 bp, Homo sapiens
gagggcgccgtgcaaaataaa

SEQ ID NO: 1568 - DNA, 18 bp, Homo sapiens
aggagaaaagcaaaataa

SEQ ID NO: 1569 - DNA, 22 bp, Homo sapiens
aggagacctattaggcaaaata

SEQ ID NO: 1570 - DNA, 22 bp, Homo sapiens
agaggattctcaagcaaagtaa

SEQ ID NO: 1571 - DNA, 23 bp, Homo sapiens
agagaaagacaaagcaaaataaa

SEQ ID NO: 1572 - DNA, 15 bp, Homo sapiens
agaggtagcaaaata

SEQ ID NO: 1573 - DNA, 21 bp, Homo sapiens
aaaggattgattcaaaataaa

SEQ ID NO: 1574 - DNA, 70 bp, Amsacta moorei entomopoxvirus
ttgaaatcaatgtttaaagttttaaattgagttttctctcttaaaaacaagctaaataaattggttttaa

SEQ ID NO: 1575 - DNA, 24 bp, Amsacta moorei entomopoxvirus
tttaaagttttaaattgagttttc

SEQ ID NO: 1576 - DNA, 24 bp, Amsacta moorei entomopoxvirus
tcttaaaaacaagctaaataaatt

SEQ ID NO: 1577 - DNA, 20 bp, Homo sapiens
tttaaagttttaaagttttc

SEQ ID NO: 1578 - DNA, 60 bp, Amsacta moorei entomopoxvirus
ccgtaatcgtggtgttcgtcgtcacttgttaactttaacgttcgagaatagcgagcatgg

SEQ ID NO: 1579 - DNA, 20 bp, Amsacta moorei entomopoxvirus
ttcgagaatagcgagcatgg

SEQ ID NO: 1580 - DNA, 24 bp, Amsacta moorei entomopoxvirus
ttcgtcgtcacttgttaactttaa

SEQ ID NO: 1581 - DNA, 22 bp, Homo sapiens
ttcgctgtcacttgttgcactt

SEQ ID NO: 1582 - DNA, 75 bp, Amsacta moorei entomopoxvirus
tctgaaatatttatctaacaatggtccaattacaagtttaattttatcacacacaatagatgtaatatattcaga

SEQ ID NO: 1583 - DNA, 24 bp, Amsacta moorei entomopoxvirus
tgaaatatttatctaacaatggtc

SEQ ID NO: 1584 - DNA, 24 bp, Amsacta moorei entomopoxvirus
tatcacacacaatagatgtaatat

SEQ ID NO: 1585 - DNA, 21 bp, Homo sapiens
tgaaatatattcttaatggtc

SEQ ID NO: 1586 - DNA, 22 bp, Homo sapiens
tgaaatatttatttataaggtc

SEQ ID NO: 1587 - DNA, 18 bp, Homo sapiens
tatttatctaaaccaatg

SEQ ID NO: 1588 - DNA, 18 bp, Homo sapiens
tgaaatatttaactaggc

SEQ ID NO: 1589 - DNA, 18 bp, Homo sapiens
tgaaatatttgccttggt

SEQ ID NO: 1590 - DNA, 18 bp, Homo sapiens
tgaaatatttctaatggt

SEQ ID NO: 1591 - DNA, 22 bp, Homo sapiens
tatcacacacatgttcagaggt

SEQ ID NO: 1592 - DNA, 23 bp, Homo sapiens
tatcatggttacaaatgtaatat

SEQ ID NO: 1593 - DNA, 17 bp, Homo sapiens
tatcacacacataatat

SEQ ID NO: 1594 - DNA, 24 bp, Homo sapiens
tatcacaaatggaacatgtaatat

SEQ ID NO: 1595 - DNA, 18 bp, Homo sapiens
tatagcacacaatagatg

SEQ ID NO: 1596 - DNA, 19 bp, Homo sapiens
tattacatacaacagacat

SEQ ID NO: 1597 - DNA, 19 bp, Homo sapiens
tattacacacaatgaggta

SEQ ID NO: 1598 - DNA, 18 bp, Homo sapiens
tcacacacaatggtctgt

SEQ ID NO: 1599 - DNA, 18 bp, Homo sapiens
tcacacacatacacatat

SEQ ID NO: 1600 - DNA, 18 bp, Homo sapiens
atcatgcacaatatatgt

SEQ ID NO: 1601 - DNA, 18 bp, Homo sapiens
tatcacacacgtagaagt

SEQ ID NO: 1602 - DNA, 61 bp, Amsacta moorei entomopoxvirus
gaggtcgtggagtacggttgatttctttttcttaaaagaagtaaactgattcgatttcctt

SEQ ID NO: 1603 - DNA, 24 bp, Amsacta moorei entomopoxvirus
tcgtggagtacggttgatttcttt

SEQ ID NO: 1604 - DNA, 20 bp, Amsacta moorei entomopoxvirus
taaactgattcgatttcctt

SEQ ID NO: 1605 - DNA, 23 bp, Homo sapiens
taaactgacttccacgtgtcctt

SEQ ID NO: 1606 - DNA, 18 bp, Homo sapiens
aactgaacaaatttcctt

SEQ ID NO: 1607 - DNA, 18 bp, Homo sapiens
taaattcgatacttcctt

SEQ ID NO: 1608 - DNA, 15 bp, Homo sapiens
taaactgacttcctc

SEQ ID NO: 1609 - DNA, 18 bp, Homo sapiens
caaactgatttctgactc

SEQ ID NO: 1610 - DNA, 18 bp, Homo sapiens
actgatcaccacttcctt

SEQ ID NO: 1611 - DNA, 17 bp, Homo sapiens
taaactatgacttcctt

SEQ ID NO: 1612 - DNA, 16 bp, Homo sapiens
aactgttgatttcctt

SEQ ID NO: 1613 - DNA, 74 bp, Amsacta moorei entomopoxvirus
cagtgatcaagaaacaatatacatgataggtgacgaaaatattcatgactggtcatatgtagacgatgacactg

SEQ ID NO: 1614 - DNA, 19 bp, Amsacta moorei entomopoxvirus
tatgtagacgatgacactg

SEQ ID NO: 1615 - DNA, 24 bp, Amsacta moorei entomopoxvirus
tacatgataggtgacgaaaatatt

SEQ ID NO: 1616 - DNA, 17 bp, Homo sapiens
tatgttggatgacactg

SEQ ID NO: 1617 - DNA, 21 bp, Homo sapiens
tatgcagacacacagacactg

SEQ ID NO: 1618 - DNA, 15 bp, Homo sapiens
atgcccgtgacactg

SEQ ID NO: 1619 - DNA, 18 bp, Homo sapiens
tatgtaaacaatgcactg

SEQ ID NO: 1620 - DNA, 19 bp, Homo sapiens
tgctgacaaggtgacactg

SEQ ID NO: 1621 - DNA, 16 bp, Homo sapiens
atgtagacaattgctg

SEQ ID NO: 1622 - DNA, 18 bp, Homo sapiens
tatgtagaccaactcctg

SEQ ID NO: 1623 - DNA, 18 bp, Homo sapiens
tgtaaagtggtgacactg

SEQ ID NO: 1624 - DNA, 20 bp, Homo sapiens
tatgtgcacaataaccactg

SEQ ID NO: 1625 - DNA, 18 bp, Homo sapiens
tacatatagtcaacgaaa

SEQ ID NO: 1626 - DNA, 18 bp, Homo sapiens
tacatgacaaaaaactga

SEQ ID NO: 1627 - DNA, 21 bp, Homo sapiens
tgataggtaaaagaagatatt

SEQ ID NO: 1628 - DNA, 72 bp, Amsacta moorei entomopoxvirus
aatattgatttatattatgcaacagtaacagaaccatttgaaaatactgtcctaagcacaatgtttaatgtt

SEQ ID NO: 1629 - DNA, 24 bp, Amsacta moorei entomopoxvirus
tattatgcaacagtaacagaacca

SEQ ID NO: 1630 - DNA, 24 bp, Amsacta moorei entomopoxvirus
tactgtcctaagcacaatgtttaa

SEQ ID NO: 1631 - DNA, 17 bp, Homo sapiens
gcaacagtgcagaacca

SEQ ID NO: 1632 - DNA, 19 bp, Homo sapiens
ttattcttggtaacagaac

SEQ ID NO: 1633 - DNA, 16 bp, Homo sapiens
ttatgcaataacagaa

SEQ ID NO: 1634 - DNA, 25 bp, Homo sapiens
cattatgcaataaattaaagagcca

SEQ ID NO: 1635 - DNA, 24 bp, Homo sapiens
cattatgcaataaattaagagcca

SEQ ID NO: 1636 - DNA, 22 bp, Homo sapiens
tactgtcttagtaaatgtttaa

SEQ ID NO: 1637 - DNA, 19 bp, Homo sapiens
tactgctctctaatgttta

SEQ ID NO: 1638 - DNA, 20 bp, Homo sapiens
tgttaacagacaatgtttaa

SEQ ID NO: 1639 - DNA, 130 bp, Amsacta moorei entomopoxvirus
accctccacccagcctcccattggtccagaatagggaagtccgccattcccgggatctcctgatggtctcgggactctcctcccggctccccattggccagagatgacgtgccaggcatggggcaatcgt

SEQ ID NO: 1640 - DNA, 24 bp, Amsacta moorei entomopoxvirus
gtccagaatagggaagtccgccat

SEQ ID NO: 1641 - DNA, 24 bp, Amsacta moorei entomopoxvirus
tccccattggccagagatgacgtg

SEQ ID NO: 1642 - DNA, 14 bp, Homo sapiens
tccagaataggcgc

SEQ ID NO: 1643 - DNA, 19 bp, Homo sapiens
gtccagaacagggaaaacc

SEQ ID NO: 1644 - DNA, 23 bp, Homo sapiens
gtccaggaaaggggttgggccat

SEQ ID NO: 1645 - DNA, 21 bp, Homo sapiens
gtccagaaatggaatactgtc

SEQ ID NO: 1646 - DNA, 19 bp, Homo sapiens
gtccagaataaggaaccca

SEQ ID NO: 1647 - DNA, 17 bp, Homo sapiens
gtcttgaataggggatc

SEQ ID NO: 1648 - DNA, 18 bp, Homo sapiens
tccctgtggccagagctg

SEQ ID NO: 1649 - DNA, 17 bp, Homo sapiens
attggccagtgagcatg

SEQ ID NO: 1650 - DNA, 23 bp, Homo sapiens
tccccactggctaggctgccgtg

SEQ ID NO: 1651 - DNA, 19 bp, Homo sapiens
tccttgtggccagaggctg

SEQ ID NO: 1652 - DNA, 63 bp, Amsacta moorei entomopoxvirus
gcaatcctgatatatcgcaatagtgggccgggcccggtccaaataaggtcagtcgccccttgc

SEQ ID NO: 1653 - DNA, 24 bp, Amsacta moorei entomopoxvirus
tatcgcaatagtgggccgggcccg

SEQ ID NO: 1654 - DNA, 24 bp, Amsacta moorei entomopoxvirus
tccaaataaggtcagtcgcccctt

SEQ ID NO: 1655 - DNA, 15 bp, Homo sapiens
cgcaccggccgggcc

SEQ ID NO: 1656 - DNA, 22 bp, Homo sapiens
tcaaaataaggatgtgtccctt

SEQ ID NO: 1657 - DNA, 23 bp, Homo sapiens
tccacagttttaagtcgcccctt

SEQ ID NO: 1658 - DNA, 20 bp, Homo sapiens
ccaggtaagggccgcccctt

SEQ ID NO: 1659 - DNA, 75 bp, Amsacta moorei entomopoxvirus
gggagatagtggacagcccccattgggccatgggctttattgcccaatgccctaatgcataggtatcagtcttcc

SEQ ID NO: 1660 - DNA, 24 bp, Amsacta moorei entomopoxvirus
tagtggacagcccccattgggcca

SEQ ID NO: 1661 - DNA, 24 bp, Amsacta moorei entomopoxvirus
tgccctaatgcataggtatcagtc

SEQ ID NO: 1662 - DNA, 15 bp, Homo sapiens
ggacagtcactgggc

SEQ ID NO: 1663 - DNA, 16 bp, Homo sapiens
tagggactcattgggc

SEQ ID NO: 1664 - DNA, 22 bp, Homo sapiens
agtggacagtctccagtcttcc

SEQ ID NO: 1665 - DNA, 21 bp, Homo sapiens
atggacagtctcaccaggcca

SEQ ID NO: 1666 - DNA, 19 bp, Homo sapiens
gtggacagtttcatgaagc

SEQ ID NO: 1667 - DNA, 19 bp, Homo sapiens
tggattccctcattgggcc

SEQ ID NO: 1668 - DNA, 20 bp, Homo sapiens
atggagcccctgttgggcca

SEQ ID NO: 1669 - DNA, 22 bp, Homo sapiens
agtgggcagccccccacttcca

SEQ ID NO: 1670 - DNA, 19 bp, Homo sapiens
gtggacaggctccctgtcg

SEQ ID NO: 1671 - DNA, 20 bp, Homo sapiens
gtggacagtcccctgagcca

SEQ ID NO: 1672 - DNA, 21 bp, Homo sapiens
tgccctaatgttagcacaggt

SEQ ID NO: 1673 - DNA, 14 bp, Homo sapiens
cctaatgcatccag

SEQ ID NO: 1674 - DNA, 24 bp, Homo sapiens
tgtcctggtgttataggcactgtc

SEQ ID NO: 1675 - DNA, 16 bp, Homo sapiens
tgccctaagtgctcag

SEQ ID NO: 1676 - DNA, 24 bp, Homo sapiens
tgcccagtgcatagaagcacagtc

SEQ ID NO: 1677 - DNA, 23 bp, Homo sapiens
tgtcctatgcatagcttttcagt

SEQ ID NO: 1678 - DNA, 18 bp, Homo sapiens
tgtcctaattataggtat

SEQ ID NO: 1679 - DNA, 86 bp, Amsacta moorei entomopoxvirus
aacgggaatgatcgattgacactatgtaaagagttcttataaattcaaagcagctcgaaaaggtgacagttgaataatctctcgtt

SEQ ID NO: 1680 - DNA, 24 bp, Amsacta moorei entomopoxvirus
gaaaaggtgacagttgaataatct

SEQ ID NO: 1681 - DNA, 24 bp, Amsacta moorei entomopoxvirus
cactatgtaaagagttcttataaa

SEQ ID NO: 1682 - DNA, 23 bp, Homo sapiens
actatgtacaagtgatttataaa

SEQ ID NO: 1683 - DNA, 20 bp, Homo sapiens
atgaccagggttcttataaa

SEQ ID NO: 1684 - DNA, 18 bp, Homo sapiens
gccaagagttcttgtaaa

SEQ ID NO: 1685 - DNA, 18 bp, Homo sapiens
actatgtaagagttctca

SEQ ID NO: 1686 - DNA, 130 bp, Amsacta moorei entomopoxvirus
agcaaccggggtctttattggccgagggtgcagtgggtagcccccattgggccgccgggatagttacccaatggctcatacatagtcatcatggtcccccatagtctgcctggcaacttaagatcccatt

SEQ ID NO: 1687 - DNA, 24 bp, Amsacta moorei entomopoxvirus
agtgggtagcccccattgggccgc

SEQ ID NO: 1688 - DNA, 24 bp, Amsacta moorei entomopoxvirus
caatggctcatacatagtcatcat

SEQ ID NO: 1689 - DNA, 19 bp, Homo sapiens
agtggctggtccccattga

SEQ ID NO: 1690 - DNA, 22 bp, Homo sapiens
gtgggggcttcctccgagccgc

SEQ ID NO: 1691 - DNA, 20 bp, Homo sapiens
agtgggtgtttcagtagccg

SEQ ID NO: 1692 - DNA, 21 bp, Homo sapiens
agtggtagccctcataattgc

SEQ ID NO: 1693 - DNA, 18 bp, Homo sapiens
agtggggagcccccatcg

SEQ ID NO: 1694 - DNA, 21 bp, Homo sapiens
agtgggtagatggtgggttgc

SEQ ID NO: 1695 - DNA, 17 bp, Homo sapiens
agtgggtaccccctttg

SEQ ID NO: 1696 - DNA, 20 bp, Homo sapiens
cagtggctcacacctgtcat

SEQ ID NO: 1697 - DNA, 18 bp, Homo sapiens
taagccatatagtcatca

SEQ ID NO: 1698 - DNA, 17 bp, Homo sapiens
ggcttcctagtcatcat

SEQ ID NO: 1699 - DNA, 17 bp, Homo sapiens
caatggctcatacctgt

SEQ ID NO: 1700 - DNA, 61 bp, Amsacta moorei entomopoxvirus
aaccctgccccctgactccccattggctaaatgggtcagtgggaggtacccattaagggtt

SEQ ID NO: 1701 - DNA, 24 bp, Amsacta moorei entomopoxvirus
tcagtgggaggtacccattaaggg

SEQ ID NO: 1702 - DNA, 24 bp, Amsacta moorei entomopoxvirus
gccccctgactccccattggctaa

SEQ ID NO: 1703 - DNA, 22 bp, Homo sapiens
tcagtggttgcaccattaaggg

SEQ ID NO: 1704 - DNA, 20 bp, Homo sapiens
aggggaaacaccattagggg

SEQ ID NO: 1705 - DNA, 23 bp, Homo sapiens
acctcctgactcctctaccaact

SEQ ID NO: 1706 - DNA, 17 bp, Homo sapiens
gccctccctcattggct

SEQ ID NO: 1707 - DNA, 14 bp, Homo sapiens
cccgactccccgcc

SEQ ID NO: 1708 - DNA, 18 bp, Homo sapiens
gccccctggctcgaagct

SEQ ID NO: 1709 - DNA, 21 bp, Homo sapiens
gccctactgtgtccattggct

SEQ ID NO: 1710 - DNA, 21 bp, Homo sapiens
cccttgaatctcccagcttgg

SEQ ID NO: 1711 - DNA, 15 bp, Homo sapiens
tgactccctaaccaa

SEQ ID NO: 1712 - DNA, 19 bp, Homo sapiens
gcccccgactttccatgct

SEQ ID NO: 1713 - DNA, 21 bp, Homo sapiens
gctacctgggtcattggctaa

SEQ ID NO: 1714 - DNA, 20 bp, Homo sapiens
gctccctgggtctccagcgg

SEQ ID NO: 1715 - DNA, 21 bp, Homo sapiens
gcttcctgacctctgtgccca

SEQ ID NO: 1716 - DNA, 19 bp, Homo sapiens
ccttgactccctgggttgg

SEQ ID NO: 1717 - DNA, 22 bp, Homo sapiens
gccccctgttttctgcccctgg

SEQ ID NO: 1718 - DNA, 22 bp, Homo sapiens
gcctcctagttcttcatcagct

SEQ ID NO: 1719 - DNA, 18 bp, Homo sapiens
gctcctggcaattggcta

SEQ ID NO: 1720 - DNA, 17 bp, Homo sapiens
cccaactctattggcta

SEQ ID NO: 1721 - DNA, 18 bp, Homo sapiens
gccccctgttctccatgg

SEQ ID NO: 1722 - DNA, 18 bp, Homo sapiens
gccccctggtttcttcgg

SEQ ID NO: 1723 - DNA, 19 bp, Homo sapiens
cccttgaccccccaaatga

SEQ ID NO: 1724 - DNA, 19 bp, Homo sapiens
gcttcctgactctacccat

SEQ ID NO: 1725 - DNA, 21 bp, Homo sapiens
gccctctgacccctcacgcca

SEQ ID NO: 1726 - DNA, 19 bp, Homo sapiens
gccccctgtcttcctatcg

SEQ ID NO: 1727 - DNA, 21 bp, Homo sapiens
gccccctgggctctccggtgg

SEQ ID NO: 1728 - DNA, 20 bp, Homo sapiens
cctccctgactttccaggct

SEQ ID NO: 1729 - DNA, 16 bp, Homo sapiens
gccccctggctcagct

SEQ ID NO: 1730 - DNA, 17 bp, Homo sapiens
cccctgactgccccgac

SEQ ID NO: 1731 - DNA, 20 bp, Homo sapiens
cctgactccctaagtgttgg

SEQ ID NO: 1732 - DNA, 16 bp, Homo sapiens
cctgactccttggact

SEQ ID NO: 1733 - DNA, 19 bp, Homo sapiens
gccccactggccccattgg

SEQ ID NO: 1734 - DNA, 19 bp, Homo sapiens
gccccctgcctctctctgg

SEQ ID NO: 1735 - DNA, 15 bp, Homo sapiens
cctgaccctccggcc

SEQ ID NO: 1736 - DNA, 18 bp, Homo sapiens
gctcactgactcccttgg

SEQ ID NO: 1737 - DNA, 23 bp, Homo sapiens
gccccctggctttcccattctcc

SEQ ID NO: 1738 - DNA, 102 bp, Ateline herpesvirus 3
cgatcaagtattctcagcctgtgatgtctcaccaagccgccgcaatctgtggcttcaaggagggtgagtacatcgtggatgacgagtaccagaagaggatcg

SEQ ID NO: 1739 - DNA, 24 bp, Ateline herpesvirus 3
tgagtacatcgtggatgacgagta

SEQ ID NO: 1740 - DNA, 24 bp, Ateline herpesvirus 3
tgtgatgtctcaccaagccgccgc

SEQ ID NO: 1741 - DNA, 18 bp, Homo sapiens
tgtgatgtctattactgc

SEQ ID NO: 1742 - DNA, 25 bp, Homo sapiens
tgtgatgtgtttatgctaacgtcgc

SEQ ID NO: 1743 - DNA, 18 bp, Homo sapiens
tgtgctgtctcacgctgc

SEQ ID NO: 1744 - DNA, 23 bp, Homo sapiens
gtgacgcggcgccgggtcgccgc

SEQ ID NO: 1745 - DNA, 17 bp, Homo sapiens
tgtgatgtccagctgcg

SEQ ID NO: 1746 - DNA, 18 bp, Homo sapiens
tgtgatgtctcctcctgc

SEQ ID NO: 1747 - DNA, 65 bp, Ateline herpesvirus 3
aagtacatcctaattttaactctaaaaggggttccttgtaaaattatttaagttatggtgtactt

SEQ ID NO: 1748 - DNA, 24 bp, Ateline herpesvirus 3
catcctaattttaactctaaaagg

SEQ ID NO: 1749 - DNA, 24 bp, Ateline herpesvirus 3
tgtaaaattatttaagttatggtg

SEQ ID NO: 1750 - DNA, 21 bp, Homo sapiens
tcctaattttaaaactaaagg

SEQ ID NO: 1751 - DNA, 23 bp, Homo sapiens
cctaactcagaggctctaagagg

SEQ ID NO: 1752 - DNA, 24 bp, Homo sapiens
tgtaaaattattaaagtcttagtg

SEQ ID NO: 1753 - DNA, 22 bp, Homo sapiens
tgtaaaatagtgctttatggtg

SEQ ID NO: 1754 - DNA, 17 bp, Homo sapiens
tgtaaaatatttaagtt

SEQ ID NO: 1755 - DNA, 64 bp, Ateline herpesvirus 3
gctaaagtgaaagtcctggaggatagcttcaaacctcttgattccggccggaagtcactagagc

SEQ ID NO: 1756 - DNA, 17 bp, Ateline herpesvirus 3
ccggaagtcactagagc

SEQ ID NO: 1757 - DNA, 24 bp, Ateline herpesvirus 3
aaagtgaaagtcctggaggatagc

SEQ ID NO: 1758 - DNA, 21 bp, Homo sapiens
aaagtgaaagctgccggatgg

SEQ ID NO: 1759 - DNA, 19 bp, Homo sapiens
aaagtggaagactccatgg

SEQ ID NO: 1760 - DNA, 23 bp, Homo sapiens
aaactgaaagcatggaggatggc

SEQ ID NO: 1761 - DNA, 21 bp, Homo sapiens
ggatggaagatagaggatggc

SEQ ID NO: 1762 - DNA, 19 bp, Homo sapiens
agtgggagtggaggatggc

SEQ ID NO: 1763 - DNA, 19 bp, Homo sapiens
aagagaaagtcgttgatgg

SEQ ID NO: 1764 - DNA, 19 bp, Homo sapiens
ggagggaagtctggaggat

SEQ ID NO: 1765 - DNA, 18 bp, Homo sapiens
ggagtgaaagcttggcgg

SEQ ID NO: 1766 - DNA, 20 bp, Homo sapiens
ggagtgaaagtgttgggagg

SEQ ID NO: 1767 - DNA, 17 bp, Homo sapiens
aaagtgaaagttggtag

SEQ ID NO: 1768 - DNA, 23 bp, Homo sapiens
ggaatggaggtcctggaaactgc

SEQ ID NO: 1769 - DNA, 18 bp, Homo sapiens
gtggggccaggaggatag

SEQ ID NO: 1770 - DNA, 65 bp, Ateline herpesvirus 3
cccggggacggggccacctagccagccagcccggggacggggccacctagccagccagcccgggg

SEQ ID NO: 1771 - DNA, 24 bp, Ateline herpesvirus 3
gccacctagccagccagcccgggg

SEQ ID NO: 1772 - DNA, 24 bp, Ateline herpesvirus 3
acctagccagccagcccggggacg

SEQ ID NO: 1773 - DNA, 23 bp, Homo sapiens
gctgctagtgggatggcccgggg

SEQ ID NO: 1774 - DNA, 21 bp, Homo sapiens
cacccagggcagggcctgggg

SEQ ID NO: 1775 - DNA, 20 bp, Homo sapiens
ctgtccgagttggcccgggg

SEQ ID NO: 1776 - DNA, 23 bp, Homo sapiens
gcacacactgggtcagcccgggg

SEQ ID NO: 1777 - DNA, 22 bp, Homo sapiens
gccacctacgccagctgcatgg

SEQ ID NO: 1778 - DNA, 20 bp, Homo sapiens
gccaaccccccagctcgggg

SEQ ID NO: 1779 - DNA, 22 bp, Homo sapiens
gccgctcggcacctgcccgggg

SEQ ID NO: 1780 - DNA, 19 bp, Homo sapiens
gccgcctgggccgcccggg

SEQ ID NO: 1781 - DNA, 20 bp, Homo sapiens
gccgcttgccagccagcccg

SEQ ID NO: 1782 - DNA, 21 bp, Homo sapiens
cagacagcggccggcccgggg

SEQ ID NO: 1783 - DNA, 21 bp, Homo sapiens
gccacccagctctatctgggg

SEQ ID NO: 1784 - DNA, 22 bp, Homo sapiens
gccacccagttccctcccgggg

SEQ ID NO: 1785 - DNA, 19 bp, Homo sapiens
cccgccgcgccggcccggg

SEQ ID NO: 1786 - DNA, 19 bp, Homo sapiens
gccgccggcctcgcccggg

SEQ ID NO: 1787 - DNA, 20 bp, Homo sapiens
ccaccgccgccggcccgggg

SEQ ID NO: 1788 - DNA, 26 bp, Homo sapiens
accgcctggccagccacagctcgggg

SEQ ID NO: 1789 - DNA, 19 bp, Homo sapiens
gcacagggccagcccgggg

SEQ ID NO: 1790 - DNA, 19 bp, Homo sapiens
gccggctggccggcccggg

SEQ ID NO: 1791 - DNA, 18 bp, Homo sapiens
gccaccacacagcccggg

SEQ ID NO: 1792 - DNA, 18 bp, Homo sapiens
cctggccagccactggag

SEQ ID NO: 1793 - DNA, 20 bp, Homo sapiens
ccacctgcgccggcccgggg

SEQ ID NO: 1794 - DNA, 18 bp, Homo sapiens
gcttcctagcagcccggg

SEQ ID NO: 1795 - DNA, 22 bp, Homo sapiens
gccgcctgtccggagcccgggg

SEQ ID NO: 1796 - DNA, 23 bp, Homo sapiens
cctggccaggccgagcggggacg

SEQ ID NO: 1797 - DNA, 68 bp, Ateline herpesvirus 3
gcgctgtggatttgtcttctacgctagattttttttaagcagtggattgtcacaatctaaagaagcgc

SEQ ID NO: 1798 - DNA, 24 bp, Ateline herpesvirus 3
tgtggatttgtcttctacgctaga

SEQ ID NO: 1799 - DNA, 24 bp, Ateline herpesvirus 3
aagcagtggattgtcacaatctaa

SEQ ID NO: 1800 - DNA, 19 bp, Homo sapiens
tgaggatctgctttgtgct

SEQ ID NO: 1801 - DNA, 18 bp, Homo sapiens
tgtggattttctttcaca

SEQ ID NO: 1802 - DNA, 19 bp, Homo sapiens
aaacagtaactcataatct

SEQ ID NO: 1803 - DNA, 15 bp, Homo sapiens
aagcagtggcaatct

SEQ ID NO: 1804 - DNA, 17 bp, Homo sapiens
aagcagtctcacaatct

SEQ ID NO: 1805 - DNA, 16 bp, Homo sapiens
agcagtggcacaatct

SEQ ID NO: 1806 - DNA, 21 bp, Homo sapiens
agcagtggaaggcattggtct

SEQ ID NO: 1807 - DNA, 16 bp, Homo sapiens
agcaatggggcaatct

SEQ ID NO: 1808 - DNA, 16 bp, Homo sapiens
agcggtttacaatcta

SEQ ID NO: 1809 - DNA, 69 bp, Ateline herpesvirus 3
cacagttttgctttgaagtgcccaatagaagcatttccattcacacttctagcatcttatttgactgtg

SEQ ID NO: 1810 - DNA, 24 bp, Ateline herpesvirus 3
tgaagtgcccaatagaagcatttc

SEQ ID NO: 1811 - DNA, 24 bp, Ateline herpesvirus 3
ttcacacttctagcatcttatttg

SEQ ID NO: 1812 - DNA, 21 bp, Homo sapiens
tgaggtgccaacaaagcattt

SEQ ID NO: 1813 - DNA, 22 bp, Homo sapiens
tgaggtgccaacaaaggcattt

SEQ ID NO: 1814 - DNA, 20 bp, Homo sapiens
tgaagtgccataatagaggc

SEQ ID NO: 1815 - DNA, 17 bp, Homo sapiens
tgaagtgttcagcattt

SEQ ID NO: 1816 - DNA, 18 bp, Homo sapiens
ttcacatttctagtttct

SEQ ID NO: 1817 - DNA, 64 bp, Ateline herpesvirus 3
gcatctgggatgaactacacgacttacgtctccgcgaaggaggccagttcatcatagcagatgc

SEQ ID NO: 1818 - DNA, 17 bp, Ateline herpesvirus 3
ttcatcatagcagatgc

SEQ ID NO: 1819 - DNA, 24 bp, Ateline herpesvirus 3
tctgggatgaactacacgacttac

SEQ ID NO: 1820 - DNA, 18 bp, Homo sapiens
ttcatcacaaaacaatgc

SEQ ID NO: 1821 - DNA, 18 bp, Homo sapiens
tccatcatggctagatgc

SEQ ID NO: 1822 - DNA, 18 bp, Homo sapiens
ttcatcacactcaggatg

SEQ ID NO: 1823 - DNA, 20 bp, Homo sapiens
tccatcactttgggcagatg

SEQ ID NO: 1824 - DNA, 22 bp, Homo sapiens
ttcatcatagggatcttagatg

SEQ ID NO: 1825 - DNA, 18 bp, Homo sapiens
ttcaccataaactgatgc

SEQ ID NO: 1826 - DNA, 18 bp, Homo sapiens
ttcatcatccgcaagtgc

SEQ ID NO: 1827 - DNA, 14 bp, Homo sapiens
ggatgaacaactta

SEQ ID NO: 1828 - DNA, 22 bp, Homo sapiens
tctgggatgaaattgtacagga

SEQ ID NO: 1829 - DNA, 79 bp, Ateline herpesvirus 3
aggcgcgtattttacatgtggtacagggtagaaaaccttgtaggtttcagttgagtcaccctgccacgtaaacccgcct

SEQ ID NO: 1830 - DNA, 23 bp, Ateline herpesvirus 3
caccctgccacgtaaacccgcct

SEQ ID NO: 1831 - DNA, 24 bp, Ateline herpesvirus 3
catgtggtacagggtagaaaacct

SEQ ID NO: 1832 - DNA, 20 bp, Homo sapiens
tgcctgttatagacccgcct

SEQ ID NO: 1833 - DNA, 17 bp, Homo sapiens
cccaccacccaccgcct

SEQ ID NO: 1834 - DNA, 18 bp, Homo sapiens
cccagcccaagcctgcct

SEQ ID NO: 1835 - DNA, 16 bp, Homo sapiens
caccctgctcgaccgc

SEQ ID NO: 1836 - DNA, 23 bp, Homo sapiens
caccccgccttcgcggcccgtct

SEQ ID NO: 1837 - DNA, 20 bp, Homo sapiens
cacgctgccacgtgacgccc

SEQ ID NO: 1838 - DNA, 14 bp, Homo sapiens
acccgcccgcccgc

SEQ ID NO: 1839 - DNA, 18 bp, Homo sapiens
caccctgccccgtgcccc

SEQ ID NO: 1840 - DNA, 24 bp, Homo sapiens
actctgccatgtacacatttgcct

SEQ ID NO: 1841 - DNA, 20 bp, Homo sapiens
caccactgtcgcggtcgcct

SEQ ID NO: 1842 - DNA, 17 bp, Homo sapiens
ctgccgcggacccgcct

SEQ ID NO: 1843 - DNA, 18 bp, Homo sapiens
ccgccacagccaccgcct

SEQ ID NO: 1844 - DNA, 21 bp, Homo sapiens
ccctcgctcccggacccgcct

SEQ ID NO: 1845 - DNA, 19 bp, Homo sapiens
ccctgccacatcctcctgc

SEQ ID NO: 1846 - DNA, 18 bp, Homo sapiens
caccctgtcagcccctgc

SEQ ID NO: 1847 - DNA, 17 bp, Homo sapiens
caccctgctgtcctgcc

SEQ ID NO: 1848 - DNA, 21 bp, Homo sapiens
ccctgccacgaaggcgaccac

SEQ ID NO: 1849 - DNA, 22 bp, Homo sapiens
tgtggcacaggtccccgggcct

SEQ ID NO: 1850 - DNA, 20 bp, Homo sapiens
catgtggtcccactgggggc

SEQ ID NO: 1851 - DNA, 17 bp, Homo sapiens
catgtggtggccaaaac

SEQ ID NO: 1852 - DNA, 19 bp, Homo sapiens
catgggtacagagcaaacc

SEQ ID NO: 1853 - DNA, 20 bp, Homo sapiens
agagcaggggtggaaagcct

SEQ ID NO: 1854 - DNA, 18 bp, Homo sapiens
catgtgttacagggataa

SEQ ID NO: 1855 - DNA, 22 bp, Homo sapiens
tgtggtacccacaaggaagcct

SEQ ID NO: 1856 - DNA, 23 bp, Homo sapiens
catgtggtagcttccagaggaaa

SEQ ID NO: 1857 - DNA, 24 bp, Homo sapiens
catttggtatgtcactgaaaacct

SEQ ID NO: 1858 - DNA, 18 bp, Homo sapiens
atgtggtacagatttaga

SEQ ID NO: 1859 - DNA, 20 bp, Homo sapiens
atgtggtaactagaaggcct

SEQ ID NO: 1860 - DNA, 64 bp, Ateline herpesvirus 3
cacttaagctatgattcctgtagtgctctttcctaagctgagcctattttgcccattttaagtg

SEQ ID NO: 1861 - DNA, 24 bp, Ateline herpesvirus 3
tatgattcctgtagtgctctttcc

SEQ ID NO: 1862 - DNA, 17 bp, Ateline herpesvirus 3
tttgcccattttaagtg

SEQ ID NO: 1863 - DNA, 19 bp, Homo sapiens
tgagtcctgctctctttcc

SEQ ID NO: 1864 - DNA, 19 bp, Homo sapiens
tatgacttttttctctttc

SEQ ID NO: 1865 - DNA, 21 bp, Homo sapiens
tatgtttcctgtatcatttcc

SEQ ID NO: 1866 - DNA, 18 bp, Homo sapiens
tatgatatctgtagtgct

SEQ ID NO: 1867 - DNA, 21 bp, Homo sapiens
tataattcttgtagacattct

SEQ ID NO: 1868 - DNA, 15 bp, Homo sapiens
tggttcctctctttc

SEQ ID NO: 1869 - DNA, 66 bp, Ateline herpesvirus 3
tgtggaaaacattaagagttgttattgaaaatattttttggtaacaaaaccatgttttaggtccca

SEQ ID NO: 1870 - DNA, 24 bp, Ateline herpesvirus 3
tggaaaacattaagagttgttatt

SEQ ID NO: 1871 - DNA, 24 bp, Ateline herpesvirus 3
tggtaacaaaaccatgttttaggt

SEQ ID NO: 1872 - DNA, 25 bp, Homo sapiens
tgtaaaacattaactaaaagttatt

SEQ ID NO: 1873 - DNA, 18 bp, Homo sapiens
tggaaggcattaaaagtt

SEQ ID NO: 1874 - DNA, 20 bp, Homo sapiens
tggaaaacatttgagaagtt

SEQ ID NO: 1875 - DNA, 23 bp, Homo sapiens
gaaaacattatccttttgttatt

SEQ ID NO: 1876 - DNA, 18 bp, Homo sapiens
tgataacaaggccaaagg

SEQ ID NO: 1877 - DNA, 20 bp, Homo sapiens
gtagcaaaaccaagttgggt

SEQ ID NO: 1878 - DNA, 16 bp, Homo sapiens
tggtaacaagcctgtg

SEQ ID NO: 1879 - DNA, 15 bp, Homo sapiens
gtaacaaagctgcag

SEQ ID NO: 1880 - DNA, 113 bp, Ateline herpesvirus 3
atgcgttgttggcgcacgatccaacaaagtcgaggattacgttggggctgctggtacattcctgacgaatcctaagtggttaaagaatgggttgagaattgctggcagggcgt

SEQ ID NO: 1881 - DNA, 24 bp, Ateline herpesvirus 3
gaggattacgttggggctgctggt

SEQ ID NO: 1882 - DNA, 24 bp, Ateline herpesvirus 3
tgggttgagaattgctggcagggc

SEQ ID NO: 1883 - DNA, 23 bp, Homo sapiens
gggttgggggaccaaggcagggc

SEQ ID NO: 1884 - DNA, 18 bp, Homo sapiens
ggttgagaatgtgtgggg

SEQ ID NO: 1885 - DNA, 20 bp, Homo sapiens
tggcttgggaatctctgggg

SEQ ID NO: 1886 - DNA, 21 bp, Homo sapiens
tgggttgaaggttctgtgggg

SEQ ID NO: 1887 - DNA, 24 bp, Homo sapiens
gggttgaggggaagagggcggggc

SEQ ID NO: 1888 - DNA, 18 bp, Homo sapiens
tgggttgggaggtgctgg

SEQ ID NO: 1889 - DNA, 21 bp, Homo sapiens
gggttggggcaggggcagggc

SEQ ID NO: 1890 - DNA, 22 bp, Homo sapiens
gggttgggatgggatggcaggg

SEQ ID NO: 1891 - DNA, 24 bp, Homo sapiens
tgggttgacaggccaatggtgggg

SEQ ID NO: 1892 - DNA, 16 bp, Homo sapiens
tgggtgggctggcagg

SEQ ID NO: 1893 - DNA, 20 bp, Homo sapiens
ggttgggacggaggcagggc

SEQ ID NO: 1894 - DNA, 71 bp, Ateline herpesvirus 3
tctcaggacatctctagttacttcgtggatcagattttccaaatcgaagcgaacaagagaataacctggga

SEQ ID NO: 1895 - DNA, 24 bp, Ateline herpesvirus 3
catctctagttacttcgtggatca

SEQ ID NO: 1896 - DNA, 24 bp, Ateline herpesvirus 3
tcgaagcgaacaagagaataacct

SEQ ID NO: 1897 - DNA, 15 bp, Homo sapiens
catctctagctgtga

SEQ ID NO: 1898 - DNA, 18 bp, Homo sapiens
tctttagttactaccatg

SEQ ID NO: 1899 - DNA, 19 bp, Homo sapiens
catctttaattactttgca

SEQ ID NO: 1900 - DNA, 21 bp, Homo sapiens
ccgaagcggggacagtgacct

SEQ ID NO: 1901 - DNA, 22 bp, Homo sapiens
tcgaagcaggcaggagcagcct

SEQ ID NO: 1902 - DNA, 18 bp, Homo sapiens
gaagcgggtgagagaaca

SEQ ID NO: 1903 - DNA, 104 bp, Ateline herpesvirus 3
ctagtttattaaataaaaaaaagggaaaacctgtttatctaacctggtcttctattaggtaatcccaggtacagttaatcccctactattatataatcttctag

SEQ ID NO: 1904 - DNA, 24 bp, Ateline herpesvirus 3
taatcccaggtacagttaatcccc

SEQ ID NO: 1905 - DNA, 24 bp, Ateline herpesvirus 3
agggaaaacctgtttatctaacct

SEQ ID NO: 1906 - DNA, 16 bp, Homo sapiens
tcccaggtctaacccc

SEQ ID NO: 1907 - DNA, 18 bp, Homo sapiens
caatcctaggtacaatca

SEQ ID NO: 1908 - DNA, 17 bp, Homo sapiens
atctgggtacaattaat

SEQ ID NO: 1909 - DNA, 20 bp, Homo sapiens
aatcccaggggctgtgatcc

SEQ ID NO: 1910 - DNA, 20 bp, Homo sapiens
cattttagcagattaatccc

SEQ ID NO: 1911 - DNA, 16 bp, Homo sapiens
tcccgtgtacaatccc

SEQ ID NO: 1912 - DNA, 17 bp, Homo sapiens
taatcccaggtggctcc

SEQ ID NO: 1913 - DNA, 21 bp, Homo sapiens
aatcacaaatatagttaatcc

SEQ ID NO: 1914 - DNA, 19 bp, Homo sapiens
atcccaggtctggacggct

SEQ ID NO: 1915 - DNA, 15 bp, Homo sapiens
atcccagggctgatc

SEQ ID NO: 1916 - DNA, 18 bp, Homo sapiens
atcccaggcgcccgctcc

SEQ ID NO: 1917 - DNA, 19 bp, Homo sapiens
atcccaaatatggttggtc

SEQ ID NO: 1918 - DNA, 99 bp, Ateline herpesvirus 3
gacttcttgacttccgccgaagtggatagattcaaacaggctgcctcagattttggcatcatgttggaaatcggaaccacccggaagattacagaagtc

SEQ ID NO: 1919 - DNA, 24 bp, Ateline herpesvirus 3
tcggaaccacccggaagattacag

SEQ ID NO: 1920 - DNA, 24 bp, Ateline herpesvirus 3
agtggatagattcaaacaggctgc

SEQ ID NO: 1921 - DNA, 16 bp, Homo sapiens
tcggaacccccgggac

SEQ ID NO: 1922 - DNA, 22 bp, Homo sapiens
agggatcacaggggcaggctgc

SEQ ID NO: 1923 - DNA, 18 bp, Homo sapiens
gtggataaagataggctg

SEQ ID NO: 1924 - DNA, 20 bp, Homo sapiens
gtggtgggcccagcaggctg

SEQ ID NO: 1925 - DNA, 21 bp, Homo sapiens
gtgggcaggaccgcaggctgc

SEQ ID NO: 1926 - DNA, 17 bp, Homo sapiens
gtggatagagtcgggtg

SEQ ID NO: 1927 - DNA, 22 bp, Homo sapiens
gcggggcaggcgggcaggctgc

SEQ ID NO: 1928 - DNA, 70 bp, Ateline herpesvirus 3
taataggcctacgataaaatgtcaacatatattttttaatttgtgtttcattaacagccatggtgtatta

SEQ ID NO: 1929 - DNA, 24 bp, Ateline herpesvirus 3
ttcattaacagccatggtgtatta

SEQ ID NO: 1930 - DNA, 24 bp, Ateline herpesvirus 3
taaaatgtcaacatatatttttta

SEQ ID NO: 1931 - DNA, 22 bp, Homo sapiens
ttcttactaaaatggtgtatta

SEQ ID NO: 1932 - DNA, 18 bp, Homo sapiens
tcattaacagtagagtgt

SEQ ID NO: 1933 - DNA, 110 bp, Ateline herpesvirus 3
ccaaactcaggaaggtgacaaattcaggaattcatggattgccgggtgattttctccagaattacccacgcattcccgatcatgattttaaacgccttcgtgatgtttgg

SEQ ID NO: 1934 - DNA, 24 bp, Ateline herpesvirus 3
atggattgccgggtgattttctcc

SEQ ID NO: 1935 - DNA, 24 bp, Ateline herpesvirus 3
ttacccacgcattcccgatcatga

SEQ ID NO: 1936 - DNA, 19 bp, Homo sapiens
gggttgccggaagcttctc

SEQ ID NO: 1937 - DNA, 20 bp, Homo sapiens
atggattgcagtccttttct

SEQ ID NO: 1938 - DNA, 19 bp, Homo sapiens
gattgcaattcattttctc

SEQ ID NO: 1939 - DNA, 21 bp, Homo sapiens
tagattgcaaaaattttctcc

SEQ ID NO: 1940 - DNA, 18 bp, Homo sapiens
tggattttatgattttct

SEQ ID NO: 1941 - DNA, 18 bp, Homo sapiens
atggcagctggtgatttt

SEQ ID NO: 1942 - DNA, 20 bp, Homo sapiens
ggattgctgaaggattttct

SEQ ID NO: 1943 - DNA, 20 bp, Homo sapiens
atggactgccttcattttct

SEQ ID NO: 1944 - DNA, 20 bp, Homo sapiens
tgggtgccgggtacttttct

SEQ ID NO: 1945 - DNA, 22 bp, Homo sapiens
atggatttgctaagttttctcc

SEQ ID NO: 1946 - DNA, 19 bp, Homo sapiens
atggattgttgcgctttct

SEQ ID NO: 1947 - DNA, 17 bp, Homo sapiens
ttacccacccgttcctg

SEQ ID NO: 1948 - DNA, 18 bp, Homo sapiens
ttacccgtacgttcctga

SEQ ID NO: 1949 - DNA, 130 bp, Ateline herpesvirus 3
gccacctagccagccagcccggggacggggccacctagccagccagcccggggacggggccacctagccagccagcccggggacggggccacctagccagccagcccggggacggggccacctagccagc

SEQ ID NO: 1950 - DNA, 24 bp, Ateline herpesvirus 3
agccagcccggggacggggccacc

SEQ ID NO: 1951 - DNA, 24 bp, Ateline herpesvirus 3
ccagcccggggacggggccaccta

SEQ ID NO: 1952 - DNA, 22 bp, Homo sapiens
agtcagtgtggtgaggggccac

SEQ ID NO: 1953 - DNA, 21 bp, Homo sapiens
agcagcagagatggggtcacc

SEQ ID NO: 1954 - DNA, 24 bp, Homo sapiens
gccagccctgggtgctctggtcac

SEQ ID NO: 1955 - DNA, 18 bp, Homo sapiens
gccagcacggggggtgcc

SEQ ID NO: 1956 - DNA, 20 bp, Homo sapiens
agccagccagggggcggggc

SEQ ID NO: 1957 - DNA, 19 bp, Homo sapiens
agctggcacagggggccac

SEQ ID NO: 1958 - DNA, 21 bp, Homo sapiens
agccggccagggacagtcacc

SEQ ID NO: 1959 - DNA, 18 bp, Homo sapiens
gctggccggggacgccgg

SEQ ID NO: 1960 - DNA, 17 bp, Homo sapiens
gccggcccggggtcccc

SEQ ID NO: 1961 - DNA, 28 bp, Homo sapiens
gccagcccgggagatgcgctggtggccc

SEQ ID NO: 1962 - DNA, 19 bp, Homo sapiens
gctcagcttggggacagcc

SEQ ID NO: 1963 - DNA, 22 bp, Homo sapiens
gcgagtccggggaccctcaggc

SEQ ID NO: 1964 - DNA, 22 bp, Homo sapiens
cagcccgcgcactggggccacc

SEQ ID NO: 1965 - DNA, 21 bp, Homo sapiens
ccggcccgggggcccctaggc

SEQ ID NO: 1966 - DNA, 23 bp, Homo sapiens
gccagggacggggtggggctgcc

SEQ ID NO: 1967 - DNA, 20 bp, Homo sapiens
gccagcccgcccgggccgcc

SEQ ID NO: 1968 - DNA, 22 bp, Homo sapiens
gcagcccgggaagggggtcacc

SEQ ID NO: 1969 - DNA, 17 bp, Homo sapiens
gccagcctgggggccac

SEQ ID NO: 1970 - DNA, 22 bp, Homo sapiens
agctggcccggaggtcccagcc

SEQ ID NO: 1971 - DNA, 16 bp, Homo sapiens
agccggccggcggggc

SEQ ID NO: 1972 - DNA, 20 bp, Homo sapiens
gcccggcccgggggcttcca

SEQ ID NO: 1973 - DNA, 18 bp, Homo sapiens
agccagccctgggattgg

SEQ ID NO: 1974 - DNA, 18 bp, Homo sapiens
gccagctggctgggccac

SEQ ID NO: 1975 - DNA, 17 bp, Homo sapiens
gctgccccggcggccac

SEQ ID NO: 1976 - DNA, 21 bp, Homo sapiens
agtgagcagagatggggccac

SEQ ID NO: 1977 - DNA, 19 bp, Homo sapiens
gccggcctgggacagggcc

SEQ ID NO: 1978 - DNA, 26 bp, Homo sapiens
agcccgccccgggtcgtcggtggccc

SEQ ID NO: 1979 - DNA, 23 bp, Homo sapiens
gctgcccgcgtcctggggccacc

SEQ ID NO: 1980 - DNA, 19 bp, Homo sapiens
gctgccctggggatctggc

SEQ ID NO: 1981 - DNA, 17 bp, Homo sapiens
agctggcccgggatgcc

SEQ ID NO: 1982 - DNA, 17 bp, Homo sapiens
gccagcccggggcggga

SEQ ID NO: 1983 - DNA, 18 bp, Homo sapiens
gccgcccggggcgccgcc

SEQ ID NO: 1984 - DNA, 17 bp, Homo sapiens
agccagcccgggcgggg

SEQ ID NO: 1985 - DNA, 24 bp, Homo sapiens
gccagcccgaggagcatcggtggc

SEQ ID NO: 1986 - DNA, 21 bp, Homo sapiens
agctacccccacggggccacc

SEQ ID NO: 1987 - DNA, 17 bp, Homo sapiens
gccggccaggaggccac

SEQ ID NO: 1988 - DNA, 19 bp, Homo sapiens
cagcccagggtcacagcca

SEQ ID NO: 1989 - DNA, 21 bp, Homo sapiens
agccaacccgtgggggctgcc

SEQ ID NO: 1990 - DNA, 21 bp, Homo sapiens
agctgggctgggggtgacgcc

SEQ ID NO: 1991 - DNA, 20 bp, Homo sapiens
gccagccctggggcaagaac

SEQ ID NO: 1992 - DNA, 20 bp, Homo sapiens
gctagctccggccgggccac

SEQ ID NO: 1993 - DNA, 17 bp, Homo sapiens
cattcggggggagccac

SEQ ID NO: 1994 - DNA, 19 bp, Homo sapiens
agccagctgtggggatgag

SEQ ID NO: 1995 - DNA, 18 bp, Homo sapiens
gctggcccgagggaggcc

SEQ ID NO: 1996 - DNA, 19 bp, Homo sapiens
gccggctctgggacggggc

SEQ ID NO: 1997 - DNA, 20 bp, Homo sapiens
gccacctgcagggggccacc

SEQ ID NO: 1998 - DNA, 17 bp, Homo sapiens
gccgcccggggcgccgc

SEQ ID NO: 1999 - DNA, 21 bp, Homo sapiens
agccagcccaggaacgcaggc

SEQ ID NO: 2000 - DNA, 19 bp, Homo sapiens
agccaccccggtggctacc

SEQ ID NO: 2001 - DNA, 19 bp, Homo sapiens
acctagcccaaggggttgc

SEQ ID NO: 2002 - DNA, 17 bp, Homo sapiens
gcgcagcgcggggccac

SEQ ID NO: 2003 - DNA, 19 bp, Homo sapiens
gccagcctggggagagcac

SEQ ID NO: 2004 - DNA, 22 bp, Homo sapiens
actggcccggggaaaagtcacc

SEQ ID NO: 2005 - DNA, 22 bp, Homo sapiens
gcttggccggaacggggttacc

SEQ ID NO: 2006 - DNA, 18 bp, Homo sapiens
gctgcccggggactcacc

SEQ ID NO: 2007 - DNA, 21 bp, Homo sapiens
gccggcctgaggacggacagc

SEQ ID NO: 2008 - DNA, 22 bp, Homo sapiens
accgcccggggccatcggtggc

SEQ ID NO: 2009 - DNA, 21 bp, Homo sapiens
cagcagagatggggtcaccta

SEQ ID NO: 2010 - DNA, 18 bp, Homo sapiens
ccggcccggggctggggc

SEQ ID NO: 2011 - DNA, 18 bp, Homo sapiens
ccggccggggacgccccc

SEQ ID NO: 2012 - DNA, 17 bp, Homo sapiens
ccggcccggggtcccct

SEQ ID NO: 2013 - DNA, 18 bp, Homo sapiens
gcccagggacagatacct

SEQ ID NO: 2014 - DNA, 21 bp, Homo sapiens
ccggctcggcggtggcaaggc

SEQ ID NO: 2015 - DNA, 15 bp, Homo sapiens
gcctggggaccacct

SEQ ID NO: 2016 - DNA, 17 bp, Homo sapiens
ccggcccgcaaggccac

SEQ ID NO: 2017 - DNA, 17 bp, Homo sapiens
ccggggacggcgcgcct

SEQ ID NO: 2018 - DNA, 21 bp, Homo sapiens
ccagcccgggcggtggggcca

SEQ ID NO: 2019 - DNA, 19 bp, Homo sapiens
agccagcgggggccaccta

SEQ ID NO: 2020 - DNA, 17 bp, Homo sapiens
ccggcccggggcgcggc

SEQ ID NO: 2021 - DNA, 18 bp, Homo sapiens
ccggctctgggacggggc

SEQ ID NO: 2022 - DNA, 18 bp, Homo sapiens
gcccggggaaaagtcacc

SEQ ID NO: 2023 - DNA, 18 bp, Homo sapiens
agtgcggggacaatccca

SEQ ID NO: 2024 - DNA, 20 bp, Homo sapiens
ccggcctgaggacggacagc

SEQ ID NO: 2025 - DNA, 84 bp, Ateline herpesvirus 3
cgagattcctgtacacagcttgcgaaaggggaagtggtcacgcactggtgaccgcattccaacctgcgttgtacaagaaattcg

SEQ ID NO: 2026 - DNA, 24 bp, Ateline herpesvirus 3
gaccgcattccaacctgcgttgta

SEQ ID NO: 2027 - DNA, 24 bp, Ateline herpesvirus 3
ttcctgtacacagcttgcgaaagg

SEQ ID NO: 2028 - DNA, 18 bp, Homo sapiens
gcattccagcctgggtta

SEQ ID NO: 2029 - DNA, 18 bp, Homo sapiens
actgcattccagcctggt

SEQ ID NO: 2030 - DNA, 19 bp, Homo sapiens
actgcattccagtctgggt

SEQ ID NO: 2031 - DNA, 17 bp, Homo sapiens
cgcattccagtctctgt

SEQ ID NO: 2032 - DNA, 19 bp, Homo sapiens
actgcattccagcctgggt

SEQ ID NO: 2033 - DNA, 19 bp, Homo sapiens
ccgcatccaacttgttttg

SEQ ID NO: 2034 - DNA, 18 bp, Homo sapiens
ttcctgtattgcggcaga

SEQ ID NO: 2035 - DNA, 19 bp, Homo sapiens
ctgtaacagcccattaagg

SEQ ID NO: 2036 - DNA, 22 bp, Homo sapiens
ttcccgtacgtttgctggaagg

SEQ ID NO: 2037 - DNA, 25 bp, Homo sapiens
ttcctgcacatagtagtagcaaagg

SEQ ID NO: 2038 - DNA, 23 bp, Homo sapiens
ttcctgtacattggacaagaagg

SEQ ID NO: 2039 - DNA, 21 bp, Homo sapiens
ttccttatgcacgccgaaagg

SEQ ID NO: 2040 - DNA, 62 bp, Ateline herpesvirus 3
catgggataagtcaaagatgtaccaagccttgggtttcgcagcaggcggtactatccccatg

SEQ ID NO: 2041 - DNA, 24 bp, Ateline herpesvirus 3
taagtcaaagatgtaccaagcctt

SEQ ID NO: 2042 - DNA, 19 bp, Ateline herpesvirus 3
aggcggtactatccccatg

SEQ ID NO: 2043 - DNA, 22 bp, Homo sapiens
caagtcaagctgtccaggcctt

SEQ ID NO: 2044 - DNA, 20 bp, Homo sapiens
gtcggaataattcaagcctt

SEQ ID NO: 2045 - DNA, 18 bp, Homo sapiens
gtcaaaccccatccaagc

SEQ ID NO: 2046 - DNA, 16 bp, Homo sapiens
ggcagcgacccccatg

SEQ ID NO: 2047 - DNA, 16 bp, Homo sapiens
agccaccatccctatg

SEQ ID NO: 2048 - DNA, 15 bp, Homo sapiens
ggcagttcccccatg

SEQ ID NO: 2049 - DNA, 19 bp, Homo sapiens
aggccggtgaccccccatg

SEQ ID NO: 2050 - DNA, 18 bp, Homo sapiens
aggggtctgacccccatg

SEQ ID NO: 2051 - DNA, 19 bp, Homo sapiens
aggcagtacttttaccatg

SEQ ID NO: 2052 - DNA, 18 bp, Homo sapiens
agacggggtatccccatg

SEQ ID NO: 2053 - DNA, 17 bp, Homo sapiens
aggccggggtccccatg

SEQ ID NO: 2054 - DNA, 16 bp, Homo sapiens
ggggtgcccccccatg

SEQ ID NO: 2055 - DNA, 18 bp, Homo sapiens
agcgagtgcctccccatg

SEQ ID NO: 2056 - DNA, 17 bp, Homo sapiens
aggcgggctttcacatg

SEQ ID NO: 2057 - DNA, 18 bp, Homo sapiens
aggctgcctttccccatg

SEQ ID NO: 2058 - DNA, 17 bp, Homo sapiens
gggagcacttccccatg

SEQ ID NO: 2059 - DNA, 16 bp, Homo sapiens
aggccacatcctcatg

SEQ ID NO: 2060 - DNA, 16 bp, Homo sapiens
aagcccagtccccatg

SEQ ID NO: 2061 - DNA, 17 bp, Homo sapiens
ggcgcctgctccccatg

SEQ ID NO: 2062 - DNA, 15 bp, Homo sapiens
ggcggcacttccatg

SEQ ID NO: 2063 - DNA, 16 bp, Homo sapiens
ggcagcacctcccatg

SEQ ID NO: 2064 - DNA, 18 bp, Homo sapiens
aggtagcagccccccatg

SEQ ID NO: 2065 - DNA, 18 bp, Homo sapiens
ggcacccgtgtccccatg

SEQ ID NO: 2066 - DNA, 16 bp, Homo sapiens
aggccggatccccatg

SEQ ID NO: 2067 - DNA, 15 bp, Homo sapiens
agcagcctccccatg

SEQ ID NO: 2068 - DNA, 18 bp, Homo sapiens
agacggggtttccccatg

SEQ ID NO: 2069 - DNA, 16 bp, Homo sapiens
agcgagtttccccatg

SEQ ID NO: 2070 - DNA, 70 bp, Ateline herpesvirus 3
atgcgtcgctactccccgcaaggatggtggtttcaacatcacgttgccttgccggggtattgcgtcgcgt

SEQ ID NO: 2071 - DNA, 24 bp, Ateline herpesvirus 3
tccccgcaaggatggtggtttcaa

SEQ ID NO: 2072 - DNA, 24 bp, Ateline herpesvirus 3
tgccttgccggggtattgcgtcgc

SEQ ID NO: 2073 - DNA, 18 bp, Homo sapiens
cccaggatggtggtttca

SEQ ID NO: 2074 - DNA, 21 bp, Homo sapiens
cccctgcgaggcaagcggttt

SEQ ID NO: 2075 - DNA, 17 bp, Homo sapiens
cctccaaggatgcctca

SEQ ID NO: 2076 - DNA, 20 bp, Homo sapiens
tctccgcaaagggtggagcc

SEQ ID NO: 2077 - DNA, 16 bp, Homo sapiens
tctccgcggaggtggc

SEQ ID NO: 2078 - DNA, 19 bp, Homo sapiens
tccctccaaggatgggacc

SEQ ID NO: 2079 - DNA, 18 bp, Homo sapiens
tccctgcaggatgggcga

SEQ ID NO: 2080 - DNA, 60 bp, Ateline herpesvirus 3
gtaagactgcctaaccgtttcaaagcagtggcgttgctcaacggacgtaaggcagattat

SEQ ID NO: 2081 - DNA, 23 bp, Ateline herpesvirus 3
tcaacggacgtaaggcagattat

SEQ ID NO: 2082 - DNA, 24 bp, Ateline herpesvirus 3
actgcctaaccgtttcaaagcagt

SEQ ID NO: 2083 - DNA, 19 bp, Homo sapiens
tcaacagatgtagctggca

SEQ ID NO: 2084 - DNA, 20 bp, Homo sapiens
ggctggtggaggcagattat

SEQ ID NO: 2085 - DNA, 18 bp, Homo sapiens
actgctaatgaaaagcag

SEQ ID NO: 2086 - DNA, 23 bp, Homo sapiens
acagctttaaagttcaaagcagt

SEQ ID NO: 2087 - DNA, 21 bp, Homo sapiens
ctgcctaactaaacaggcagt

SEQ ID NO: 2088 - DNA, 23 bp, Homo sapiens
ctggagttgtgttttaaagcagt

SEQ ID NO: 2089 - DNA, 18 bp, Homo sapiens
ccaaattttcaaagcagt

SEQ ID NO: 2090 - DNA, 130 bp, Ateline herpesvirus 3
cgccggcctcccccggctcccggccctccgccccgccggcccgggcccgcggccgccgcccccggccgccccgcgccgcgcgccgggccgctttcggttcgcggggccgggggtcccgcggggggccggg

SEQ ID NO: 2091 - DNA, 24 bp, Ateline herpesvirus 3
tcggttcgcggggccgggggtccc

SEQ ID NO: 2092 - DNA, 24 bp, Ateline herpesvirus 3
ccccgccggcccgggcccgcggcc

SEQ ID NO: 2093 - DNA, 15 bp, Homo sapiens
ggtcctgccgggggt

SEQ ID NO: 2094 - DNA, 24 bp, Homo sapiens
tcgtttcgcggggcctccgggacc

SEQ ID NO: 2095 - DNA, 72 bp, Ateline herpesvirus 3
gtcgagggtgtagcggccggtcgttcaatgtatcctccgggatttttggtcggtcgttacgataccatcgat

SEQ ID NO: 2096 - DNA, 24 bp, Ateline herpesvirus 3
tagcggccggtcgttcaatgtatc

SEQ ID NO: 2097 - DNA, 24 bp, Ateline herpesvirus 3
ttggtcggtcgttacgataccatc

SEQ ID NO: 2098 - DNA, 20 bp, Homo sapiens
ggatggcctgatcaatgtat

SEQ ID NO: 2099 - DNA, 73 bp, Ateline herpesvirus 3
gggtgccgctccgccgggcccggccgactcccgggagcgccccggtccggccgagcccggcggcgccgcgccc

SEQ ID NO: 2100 - DNA, 24 bp, Ateline herpesvirus 3
tccggccgagcccggcggcgccgc

SEQ ID NO: 2101 - DNA, 24 bp, Ateline herpesvirus 3
ccgccgggcccggccgactcccgg

SEQ ID NO: 2102 - DNA, 20 bp, Homo sapiens
tccggccggctctggcggcg

SEQ ID NO: 2103 - DNA, 20 bp, Homo sapiens
ggcccagcccggctacgggc

SEQ ID NO: 2104 - DNA, 21 bp, Homo sapiens
tccggccagcctggctggggc

SEQ ID NO: 2105 - DNA, 20 bp, Homo sapiens
ccggccgagtggagcgctgc

SEQ ID NO: 2106 - DNA, 22 bp, Homo sapiens
ggctcccggctggcggcgccgc

SEQ ID NO: 2107 - DNA, 18 bp, Homo sapiens
tccgtcgagcccaagccg

SEQ ID NO: 2108 - DNA, 23 bp, Homo sapiens
tccgtggttattggcggcgccgc

SEQ ID NO: 2109 - DNA, 22 bp, Homo sapiens
tcgggccgactcgcggcgccgc

SEQ ID NO: 2110 - DNA, 17 bp, Homo sapiens
cggcggtggcggcgccg

SEQ ID NO: 2111 - DNA, 16 bp, Homo sapiens
accgctcggcggcgcc

SEQ ID NO: 2112 - DNA, 25 bp, Homo sapiens
ggccgagccggtgcgcggcgccgcc

SEQ ID NO: 2113 - DNA, 23 bp, Homo sapiens
tccagccgggtccgggttcccgc

SEQ ID NO: 2114 - DNA, 21 bp, Homo sapiens
cggccgggctcgtggcgccgc

SEQ ID NO: 2115 - DNA, 24 bp, Homo sapiens
tccggccgcgcccgcgctggccgc

SEQ ID NO: 2116 - DNA, 14 bp, Homo sapiens
tccggccgcggcac

SEQ ID NO: 2117 - DNA, 20 bp, Homo sapiens
gccgggctcggtggcgccgc

SEQ ID NO: 2118 - DNA, 23 bp, Homo sapiens
cctccacagcccggcggcgccgc

SEQ ID NO: 2119 - DNA, 22 bp, Homo sapiens
tcccgccggcagccggcgccgc

SEQ ID NO: 2120 - DNA, 18 bp, Homo sapiens
tccggccgggccgctccg

SEQ ID NO: 2121 - DNA, 19 bp, Homo sapiens
tccggccgggactcggtgg

SEQ ID NO: 2122 - DNA, 18 bp, Homo sapiens
cggccgagcccggggcgc

SEQ ID NO: 2123 - DNA, 70 bp, Ateline herpesvirus 3
ctgctagtagggctgctgggctgctagtagggctcctgggctgctagtagggctgctgggctgctagtag

SEQ ID NO: 2124 - DNA, 24 bp, Ateline herpesvirus 3
ctgctagtagggctgctgggctgc

SEQ ID NO: 2125 - DNA, 24 bp, Ateline herpesvirus 3
agtagggctgctgggctgctagta

SEQ ID NO: 2126 - DNA, 22 bp, Homo sapiens
ctgcctggtacccactgggctg

SEQ ID NO: 2127 - DNA, 16 bp, Homo sapiens
ctgctggagggtgctg

SEQ ID NO: 2128 - DNA, 19 bp, Homo sapiens
ctggtgtggactgggctgc

SEQ ID NO: 2129 - DNA, 18 bp, Homo sapiens
ctgctctttgctgggctg

SEQ ID NO: 2130 - DNA, 18 bp, Homo sapiens
ctgctgtttgctgggctg

SEQ ID NO: 2131 - DNA, 17 bp, Homo sapiens
ctgctgtagggtggctg

SEQ ID NO: 2132 - DNA, 23 bp, Homo sapiens
ctgctactggggctgctctcggc

SEQ ID NO: 2133 - DNA, 20 bp, Homo sapiens
ctgttagtagagttacttgc

SEQ ID NO: 2134 - DNA, 19 bp, Homo sapiens
ctgctgggctgctgggctg

SEQ ID NO: 2135 - DNA, 88 bp, Ateline herpesvirus 3
cttgcagttcacccaccatgttcgaatttacccgcccccccgttttggcagggaaacagctttcggctcatggtgtaggaattacaag

SEQ ID NO: 2136 - DNA, 24 bp, Ateline herpesvirus 3
caccatgttcgaatttacccgccc

SEQ ID NO: 2137 - DNA, 22 bp, Ateline herpesvirus 3
ctcatggtgtaggaattacaag

SEQ ID NO: 2138 - DNA, 17 bp, Homo sapiens
ccatgttcacacctgcc

SEQ ID NO: 2139 - DNA, 17 bp, Homo sapiens
caccatgttgaacgtcc

SEQ ID NO: 2140 - DNA, 15 bp, Homo sapiens
accatgttttcccac

SEQ ID NO: 2141 - DNA, 21 bp, Homo sapiens
ctcaaggtgtagggccccaag

SEQ ID NO: 2142 - DNA, 20 bp, Homo sapiens
cacagtcaaggtaggaatta

SEQ ID NO: 2143 - DNA, 20 bp, Homo sapiens
ctcgagtggctggaattaca

SEQ ID NO: 2144 - DNA, 20 bp, Homo sapiens
ctcctggggaagattacaag

SEQ ID NO: 2145 - DNA, 19 bp, Homo sapiens
ctcatggtgggtttacaag

SEQ ID NO: 2146 - DNA, 19 bp, Homo sapiens
ctctgctgcaggaattgca

SEQ ID NO: 2147 - DNA, 16 bp, Homo sapiens
ctcatggtgtttacaa

SEQ ID NO: 2148 - DNA, 80 bp, Ateline herpesvirus 3
tgggaagacttgcgcgaccctgagtatttaaaggatttactatccgacactcaggcaatcgacaaagtgcgagtctacca

SEQ ID NO: 2149 - DNA, 24 bp, Ateline herpesvirus 3
accctgagtatttaaaggatttac

SEQ ID NO: 2150 - DNA, 24 bp, Ateline herpesvirus 3
tcaggcaatcgacaaagtgcgagt

SEQ ID NO: 2151 - DNA, 17 bp, Homo sapiens
accctgaggtttagaga

SEQ ID NO: 2152 - DNA, 21 bp, Homo sapiens
acccagtcaatagaggattta

SEQ ID NO: 2153 - DNA, 17 bp, Homo sapiens
ccctgcttgaaggattt

SEQ ID NO: 2154 - DNA, 17 bp, Homo sapiens
ctcaggccaaaggattt

SEQ ID NO: 2155 - DNA, 22 bp, Homo sapiens
cctgggtattttacaggtttac

SEQ ID NO: 2156 - DNA, 16 bp, Homo sapiens
ctgaatatttagactt

SEQ ID NO: 2157 - DNA, 17 bp, Homo sapiens
ccctggtatttaagaaa

SEQ ID NO: 2158 - DNA, 22 bp, Homo sapiens
ctgagtaaaagacaagggttta

SEQ ID NO: 2159 - DNA, 19 bp, Homo sapiens
cctgaaaagagaggattta

SEQ ID NO: 2160 - DNA, 74 bp, Ateline herpesvirus 3
ataaaccctatatgaggaaattttattagtacgtttgtgtaactgcaaaataaaattttaaataaatactttat

SEQ ID NO: 2161 - DNA, 24 bp, Ateline herpesvirus 3
aggaaattttattagtacgtttgt

SEQ ID NO: 2162 - DNA, 24 bp, Ateline herpesvirus 3
tgcaaaataaaattttaaataaat

SEQ ID NO: 2163 - DNA, 26 bp, Homo sapiens
agaggttttattagttgctggtttgt

SEQ ID NO: 2164 - DNA, 77 bp, Ateline herpesvirus 3
gcatatatccgttttctcctttgtatgaacccggtgggcaagggccacataaaaacattagaggggcaacgggctgc

SEQ ID NO: 2165 - DNA, 24 bp, Ateline herpesvirus 3
tcctttgtatgaacccggtgggca

SEQ ID NO: 2166 - DNA, 24 bp, Ateline herpesvirus 3
taaaaacattagaggggcaacggg

SEQ ID NO: 2167 - DNA, 21 bp, Homo sapiens
tccggcgggacccggtgggca

SEQ ID NO: 2168 - DNA, 21 bp, Homo sapiens
tccctgtatgagcttggtggg

SEQ ID NO: 2169 - DNA, 18 bp, Homo sapiens
tttgtataatccattgtg

SEQ ID NO: 2170 - DNA, 22 bp, Homo sapiens
ccctggagctgagcccggtggg

SEQ ID NO: 2171 - DNA, 21 bp, Homo sapiens
cactggagctaggctggcggg

SEQ ID NO: 2172 - DNA, 20 bp, Homo sapiens
acatgagggacataaatggg

SEQ ID NO: 2173 - DNA, 17 bp, Homo sapiens
aaaacattaaaatgcgg

SEQ ID NO: 2174 - DNA, 76 bp, Ateline herpesvirus 3
ttgcgccacagcggacgtacatcaatcagattcgttacttgactgatgcacacaaagaaaatgccgcatggtacaa

SEQ ID NO: 2175 - DNA, 24 bp, Ateline herpesvirus 3
cagcggacgtacatcaatcagatt

SEQ ID NO: 2176 - DNA, 24 bp, Ateline herpesvirus 3
tgatgcacacaaagaaaatgccgc

SEQ ID NO: 2177 - DNA, 24 bp, Homo sapiens
cagggacttcaaattgatcagatt

SEQ ID NO: 2178 - DNA, 20 bp, Homo sapiens
agtggagactcaatcagatt

SEQ ID NO: 2179 - DNA, 22 bp, Homo sapiens
tgcacacaggcccatctgccgc

SEQ ID NO: 2180 - DNA, 18 bp, Homo sapiens
tgatgcacacagacaggc

SEQ ID NO: 2181 - DNA, 22 bp, Homo sapiens
tggtgcacacaggtggaccccg

SEQ ID NO: 2182 - DNA, 24 bp, Homo sapiens
tgaatgagggaaagggaatgccgc

SEQ ID NO: 2183 - DNA, 22 bp, Homo sapiens
taatgcacatagagaacaaagc

SEQ ID NO: 2184 - DNA, 18 bp, Homo sapiens
tggtacacacaagggaaa

SEQ ID NO: 2185 - DNA, 75 bp, Ateline herpesvirus 3
tgtaacttcacgctaccctaaacgtacaatactgggactagaacccagaggtagttagaatatacggtagttaca

SEQ ID NO: 2186 - DNA, 24 bp, Ateline herpesvirus 3
tcacgctaccctaaacgtacaata

SEQ ID NO: 2187 - DNA, 20 bp, Ateline herpesvirus 3
tagaatatacggtagttaca

SEQ ID NO: 2188 - DNA, 21 bp, Homo sapiens
tcacgtacttactgtacaata

SEQ ID NO: 2189 - DNA, 18 bp, Homo sapiens
gctactctttgcacaata

SEQ ID NO: 2190 - DNA, 20 bp, Homo sapiens
tcacgctacccaggacacgc

SEQ ID NO: 2191 - DNA, 15 bp, Homo sapiens
gctctagcgtacaat

SEQ ID NO: 2192 - DNA, 20 bp, Homo sapiens
gcgactgtaaacgtacaata

SEQ ID NO: 2193 - DNA, 17 bp, Homo sapiens
tcacttaccctaaagca

SEQ ID NO: 2194 - DNA, 19 bp, Homo sapiens
acactttaaacgtacaata

SEQ ID NO: 2195 - DNA, 60 bp, Ateline herpesvirus 3
ggccatcttcctcatgatgccgcgatttgtcaagaaatacgcgattggggctgcatggct

SEQ ID NO: 2196 - DNA, 24 bp, Ateline herpesvirus 3
ttcctcatgatgccgcgatttgtc

SEQ ID NO: 2197 - DNA, 23 bp, Ateline herpesvirus 3
tacgcgattggggctgcatggct

SEQ ID NO: 2198 - DNA, 22 bp, Homo sapiens
ttcgtcatgatgtccaagctgt

SEQ ID NO: 2199 - DNA, 20 bp, Homo sapiens
cacgcgacttctgcgtggct

SEQ ID NO: 2200 - DNA, 18 bp, Homo sapiens
gcggctgaagacatggct

SEQ ID NO: 2201 - DNA, 69 bp, Ateline herpesvirus 3
acacccttacaccgatgataagaccaacgagcagagaataaaccgcgttggcagaatcatgaagggtgt

SEQ ID NO: 2202 - DNA, 22 bp, Ateline herpesvirus 3
ttggcagaatcatgaagggtgt

SEQ ID NO: 2203 - DNA, 24 bp, Ateline herpesvirus 3
tacaccgatgataagaccaacgag

SEQ ID NO: 2204 - DNA, 16 bp, Homo sapiens
ttggcagagtgtgggc

SEQ ID NO: 2205 - DNA, 18 bp, Homo sapiens
ttggagaatcatgcatgt

SEQ ID NO: 2206 - DNA, 16 bp, Homo sapiens
ttggaggccaagggtg

SEQ ID NO: 2207 - DNA, 17 bp, Homo sapiens
ctggcagagtgagggtg

SEQ ID NO: 2208 - DNA, 17 bp, Homo sapiens
ttggcagaatctgtggt

SEQ ID NO: 2209 - DNA, 19 bp, Homo sapiens
ttgacagaattgtggctat

SEQ ID NO: 2210 - DNA, 19 bp, Homo sapiens
ttggcataatcatgagaac

SEQ ID NO: 2211 - DNA, 16 bp, Homo sapiens
tggtgagtgaagggtg

SEQ ID NO: 2212 - DNA, 20 bp, Homo sapiens
ttggtgaatcatgcactagt

SEQ ID NO: 2213 - DNA, 15 bp, Homo sapiens
ccaatgagaccaacg

SEQ ID NO: 2214 - DNA, 78 bp, Ateline herpesvirus 3
gctgggctgctagtagggctgctgggctgctagtagggctgcctgctggcttgcttgcttgcttgctagtggggccgc

SEQ ID NO: 2215 - DNA, 24 bp, Tomato mosaic virus
tggcttgcttgcttgcttgctagt

SEQ ID NO: 2216 - DNA, 24 bp, Ateline herpesvirus 3
tgctagtagggctgctgggctgct

SEQ ID NO: 2217 - DNA, 22 bp, Homo sapiens
tggttttcttctctttgctagt

SEQ ID NO: 2218 - DNA, 22 bp, Homo sapiens
tggatttgtttgcttgcttgct

SEQ ID NO: 2219 - DNA, 69 bp, Ateline herpesvirus 3
tcgacaactacctccgaaagtgtgtcctgttggatgttttgtggattaggtaaaacagaaagttgtgga

SEQ ID NO: 2220 - DNA, 24 bp, Ateline herpesvirus 3
tgttttgtggattaggtaaaacag

SEQ ID NO: 2221 - DNA, 24 bp, Ateline herpesvirus 3
gacaactacctccgaaagtgtgtc

SEQ ID NO: 2222 - DNA, 19 bp, Homo sapiens
tgttttatggaaaacaagg

SEQ ID NO: 2223 - DNA, 23 bp, Homo sapiens
tgttttgtgacattttaaaacag

SEQ ID NO: 2224 - DNA, 19 bp, Homo sapiens
tgttctgtgggattaaaac

SEQ ID NO: 2225 - DNA, 26 bp, Homo sapiens
tgttttgtgtattggtaatccaacag

SEQ ID NO: 2226 - DNA, 61 bp, Ateline herpesvirus 3
ctggaactggtggaacttgtctatgcgcaaattacagaggacgaggaacaccgtataccag

SEQ ID NO: 2227 - DNA, 23 bp, Ateline herpesvirus 3
ggacgaggaacaccgtataccag

SEQ ID NO: 2228 - DNA, 24 bp, Ateline herpesvirus 3
actggtggaacttgtctatgcgca

SEQ ID NO: 2229 - DNA, 21 bp, Homo sapiens
ctggtggaatttctgtttgca

SEQ ID NO: 2230 - DNA, 18 bp, Homo sapiens
actggtgggtttgggcac

SEQ ID NO: 2231 - DNA, 18 bp, Homo sapiens
tggtggcggcgcatgcgc

SEQ ID NO: 2232 - DNA, 63 bp, Ateline herpesvirus 3
ggacgcgggaatttccttgatgattacgagaacttcgtttcaggcatcaaggttcctgccgcc

SEQ ID NO: 2233 - DNA, 22 bp, Ateline herpesvirus 3
aggcatcaaggttcctgccgcc

SEQ ID NO: 2234 - DNA, 24 bp, Ateline herpesvirus 3
tccttgatgattacgagaacttcg

SEQ ID NO: 2235 - DNA, 18 bp, Homo sapiens
cttgataactgagaactt

SEQ ID NO: 2236 - DNA, 88 bp, Saimiriine herpesvirus 2
gaggtgtcggttgacggaaagagttttggccagggcggcaaccgttatagattcgtctttcgctatgactctttgctgtcgacacctt

SEQ ID NO: 2237 - DNA, 24 bp, Saimiriine herpesvirus 2
tgacggaaagagttttggccaggg

SEQ ID NO: 2238 - DNA, 24 bp, Saimiriine herpesvirus 2
ttcgctatgactctttgctgtcga

SEQ ID NO: 2239 - DNA, 24 bp, Homo sapiens
ttctctatggctttgccaaatcga

SEQ ID NO: 2240 - DNA, 103 bp, Saimiriine herpesvirus 2
gtccgattcgatacaagaaccctgtcatgtctcaccaggctgccgaaatctgtggattgaagcctggggagtatgaagtggatgataggtatcaggaaaggat

SEQ ID NO: 2241 - DNA, 24 bp, Saimiriine herpesvirus 2
ttgaagcctggggagtatgaagtg

SEQ ID NO: 2242 - DNA, 24 bp, Saimiriine herpesvirus 2
tgtcatgtctcaccaggctgccga

SEQ ID NO: 2243 - DNA, 18 bp, Homo sapiens
tgtcatgtttcacaggcc

SEQ ID NO: 2244 - DNA, 17 bp, Homo sapiens
tgtcatacaccaggttg

SEQ ID NO: 2245 - DNA, 18 bp, Homo sapiens
tgccggtcactgggctgc

SEQ ID NO: 2246 - DNA, 19 bp, Homo sapiens
tgccatgtctcgcaggccg

SEQ ID NO: 2247 - DNA, 19 bp, Homo sapiens
tgttatgtttcccaggctg

SEQ ID NO: 2248 - DNA, 19 bp, Homo sapiens
gtcatgtcttgtccctctg

SEQ ID NO: 2249 - DNA, 17 bp, Homo sapiens
tgcatgtctcgtggccg

SEQ ID NO: 2250 - DNA, 20 bp, Homo sapiens
tgtgtggtgaaccaggctgc

SEQ ID NO: 2251 - DNA, 20 bp, Homo sapiens
tgccctgtgccaggctgtcg

SEQ ID NO: 2252 - DNA, 20 bp, Homo sapiens
gtctccacgctgggctgccg

SEQ ID NO: 2253 - DNA, 68 bp, Saimiriine herpesvirus 2
tcattgacaacttcaagatttgcttccccgtaaacgggaaatggatctatggtcaagggttgtcatgg

SEQ ID NO: 2254 - DNA, 24 bp, Saimiriine herpesvirus 2
atggatctatggtcaagggttgtc

SEQ ID NO: 2255 - DNA, 24 bp, Saimiriine herpesvirus 2
ttcaagatttgcttccccgtaaac

SEQ ID NO: 2256 - DNA, 18 bp, Homo sapiens
tcccagctgcttccctgt

SEQ ID NO: 2257 - DNA, 19 bp, Homo sapiens
ttcaagattagctgataaa

SEQ ID NO: 2258 - DNA, 18 bp, Homo sapiens
ttcaagatttgctgtccc

SEQ ID NO: 2259 - DNA, 117 bp, Saimiriine herpesvirus 2
agagcttttcagactaaaaatgtgttacaatatttatagactaaggataagattatctctatattctttcagaagatatggagattgtaccaacatttatagactctccaacgctct

SEQ ID NO: 2260 - DNA, 24 bp, Saimiriine herpesvirus 2
tacaatatttatagactaaggata

SEQ ID NO: 2261 - DNA, 24 bp, Saimiriine herpesvirus 2
tctttcagaagatatggagattgt

SEQ ID NO: 2262 - DNA, 21 bp, Homo sapiens
tctttcaggagatagtattgt

SEQ ID NO: 2263 - DNA, 21 bp, Homo sapiens
tctttcagaagaataacatgt

SEQ ID NO: 2264 - DNA, 23 bp, Homo sapiens
tctttcagaaatagacacattgt

SEQ ID NO: 2265 - DNA, 21 bp, Homo sapiens
tttcagaagaaatactcttgt

SEQ ID NO: 2266 - DNA, 91 bp, Saimiriine herpesvirus 2
atctcgtccccatggaagaggcgaaagaggcacctaggcagcagcttgttcctaggcgttcaactttcgtcgataaccatgaggaggaggt

SEQ ID NO: 2267 - DNA, 24 bp, Saimiriine herpesvirus 2
cgttcaactttcgtcgataaccat

SEQ ID NO: 2268 - DNA, 24 bp, Saimiriine herpesvirus 2
aggcgaaagaggcacctaggcagc

SEQ ID NO: 2269 - DNA, 17 bp, Homo sapiens
agcaggtacttaggcag

SEQ ID NO: 2270 - DNA, 23 bp, Homo sapiens
ggccggagcgaggtctaggcagc

SEQ ID NO: 2271 - DNA, 24 bp, Homo sapiens
aggtgaaagagggtacagggcggc

SEQ ID NO: 2272 - DNA, 18 bp, Homo sapiens
aggcaaggaggcacccag

SEQ ID NO: 2273 - DNA, 19 bp, Homo sapiens
ggcgaaggggcacccacgc

SEQ ID NO: 2274 - DNA, 19 bp, Homo sapiens
gggacaggcacctcagagc

SEQ ID NO: 2275 - DNA, 21 bp, Homo sapiens
ggtgaagaagggacaggcagc

SEQ ID NO: 2276 - DNA, 17 bp, Homo sapiens
agcgggagaggcacagc

SEQ ID NO: 2277 - DNA, 15 bp, Homo sapiens
ggaagaggcaccaag

SEQ ID NO: 2278 - DNA, 16 bp, Homo sapiens
aggcagaagataggca

SEQ ID NO: 2279 - DNA, 20 bp, Homo sapiens
aggtagaagaggcatcttga

SEQ ID NO: 2280 - DNA, 21 bp, Homo sapiens
ggcgaggaaggcgccagacag

SEQ ID NO: 2281 - DNA, 22 bp, Homo sapiens
aggcgggggcggcagctgcggc

SEQ ID NO: 2282 - DNA, 18 bp, Homo sapiens
aggctggagagcaggcag

SEQ ID NO: 2283 - DNA, 20 bp, Homo sapiens
aggccagggaggcacctggc

SEQ ID NO: 2284 - DNA, 23 bp, Homo sapiens
agctggggggagggctaggcagc

SEQ ID NO: 2285 - DNA, 23 bp, Homo sapiens
aggcgaggtgccgcctaggcagc

SEQ ID NO: 2286 - DNA, 17 bp, Homo sapiens
ggcgggggaggcacagc

SEQ ID NO: 2287 - DNA, 18 bp, Homo sapiens
aggagagagggcaggcag

SEQ ID NO: 2288 - DNA, 19 bp, Homo sapiens
agggagggaggcaccgtgg

SEQ ID NO: 2289 - DNA, 16 bp, Homo sapiens
agggaaagaggcagca

SEQ ID NO: 2290 - DNA, 17 bp, Homo sapiens
ggcgaaagagaaggcag

SEQ ID NO: 2291 - DNA, 18 bp, Homo sapiens
aggtggaggtgtaggcag

SEQ ID NO: 2292 - DNA, 24 bp, Homo sapiens
aggcgaggagagggatcaggcagc

SEQ ID NO: 2293 - DNA, 19 bp, Homo sapiens
agtgaaagaggtcccgtgg

SEQ ID NO: 2294 - DNA, 15 bp, Homo sapiens
aggtgaaagaggggc

SEQ ID NO: 2295 - DNA, 23 bp, Homo sapiens
aggtgaaagagaggggctggcag

SEQ ID NO: 2296 - DNA, 18 bp, Homo sapiens
ggctgaagaactaggcag

SEQ ID NO: 2297 - DNA, 23 bp, Homo sapiens
aggcagggaggcggggctgtggc

SEQ ID NO: 2298 - DNA, 22 bp, Homo sapiens
aggcaaggatactttaggcagc

SEQ ID NO: 2299 - DNA, 21 bp, Homo sapiens
aggcagctccgcctgggcagc

SEQ ID NO: 2300 - DNA, 17 bp, Homo sapiens
aggcgaaggcgaaggcg

SEQ ID NO: 2301 - DNA, 79 bp, Saimiriine herpesvirus 2
gcctcagggttccagacacgttccgccggaggactttgcggccagggtggcagagtccctgagcctggacctgagaggt

SEQ ID NO: 2302 - DNA, 24 bp, Saimiriine herpesvirus 2
tccctgagcctggacctgagaggt

SEQ ID NO: 2303 - DNA, 24 bp, Saimiriine herpesvirus 2
ttccagacacgttccgccggagga

SEQ ID NO: 2304 - DNA, 18 bp, Homo sapiens
tccccgttccgccggagg

SEQ ID NO: 2305 - DNA, 16 bp, Homo sapiens
tcctagacacgttggg

SEQ ID NO: 2306 - DNA, 18 bp, Homo sapiens
tcctggacacgttccggg

SEQ ID NO: 2307 - DNA, 25 bp, Homo sapiens
ttccagacttagtcatgctggagga

SEQ ID NO: 2308 - DNA, 87 bp, Saimiriine herpesvirus 2
ggttcttcgccaacatggcggtcctcgcaggtgtcaagacccatctcttgaaactgcagactgcgacgtacggcgatttggagaacc

SEQ ID NO: 2309 - DNA, 24 bp, Saimiriine herpesvirus 2
aaactgcagactgcgacgtacggc

SEQ ID NO: 2310 - DNA, 24 bp, Saimiriine herpesvirus 2
tggcggtcctcgcaggtgtcaaga

SEQ ID NO: 2311 - DNA, 17 bp, Homo sapiens
ggcggtccttgcagcgc

SEQ ID NO: 2312 - DNA, 21 bp, Homo sapiens
ggcgggagaccgcaggtgtca

SEQ ID NO: 2313 - DNA, 19 bp, Homo sapiens
tggcggtctctgtgctcgg

SEQ ID NO: 2314 - DNA, 127 bp, Saimiriine herpesvirus 2
gtgtgtgtgtgtgcgctcacacggaacgagaacaagtgtgtgtgtgcgctcacacggaacgagaacaagtgtgtgtgtgtgtgcgctcacacggaacgagaacaagtgtgtgtgtgcgcgctcacac

SEQ ID NO: 2315 - DNA, 24 bp, Saimiriine herpesvirus 2
tcacacggaacgagaacaagtgtg

SEQ ID NO: 2316 - DNA, 24 bp, Saimiriine herpesvirus 2
cacacggaacgagaacaagtgtgt

SEQ ID NO: 2317 - DNA, 21 bp, Homo sapiens
tcacacggggcagtgggtgtg

SEQ ID NO: 2318 - DNA, 20 bp, Homo sapiens
cacggaacgcaggaagcacg

SEQ ID NO: 2319 - DNA, 19 bp, Homo sapiens
tcacacggagtagaaaatg

SEQ ID NO: 2320 - DNA, 131 bp, Saimiriine herpesvirus 2
tgacgaaatgccacacattaggagtgtgaggaacacgggcatccatgggctacctggggatttcttgtcgaattaccctagactgcctacgcctgtatttcatcgcctccgcgatttgtgggatgatgtca

SEQ ID NO: 2321 - DNA, 24 bp, Saimiriine herpesvirus 2
tgaggaacacgggcatccatgggc

SEQ ID NO: 2322 - DNA, 24 bp, Saimiriine herpesvirus 2
attaccctagactgcctacgcctg

SEQ ID NO: 2323 - DNA, 23 bp, Homo sapiens
attaccccgtgactttgtgcctg

SEQ ID NO: 2324 - DNA, 17 bp, Homo sapiens
attaccctagactccta

SEQ ID NO: 2325 - DNA, 18 bp, Homo sapiens
ttaccctgtactgcccac

SEQ ID NO: 2326 - DNA, 83 bp, Saimiriine herpesvirus 2
cggtgctgaggggttacaaagccgcgttcactccgcatgtcgagcttgacatgccgaacgcaacttcgtacaacttagcaccg

SEQ ID NO: 2327 - DNA, 24 bp, Saimiriine herpesvirus 2
catgccgaacgcaacttcgtacaa

SEQ ID NO: 2328 - DNA, 24 bp, Saimiriine herpesvirus 2
cgcgttcactccgcatgtcgagct

SEQ ID NO: 2329 - DNA, 17 bp, Homo sapiens
gtttttctcatgtcgag

SEQ ID NO: 2330 - DNA, 25 bp, Homo sapiens
cggttcactttgccccgcacgagct

SEQ ID NO: 2331 - DNA, 72 bp, Saimiriine herpesvirus 2
gatccagctgtggtgcctaaggacatcagggacaagtaccccctggttccgaacggtgaccacaacgagatc

SEQ ID NO: 2332 - DNA, 24 bp, Saimiriine herpesvirus 2
tgtggtgcctaaggacatcaggga

SEQ ID NO: 2333 - DNA, 24 bp, Saimiriine herpesvirus 2
tccgaacggtgaccacaacgagat

SEQ ID NO: 2334 - DNA, 18 bp, Homo sapiens
tccgaacagtggtcagca

SEQ ID NO: 2335 - DNA, 65 bp, Sheeppox virus
gtatatacttagatgagtcatttaaaacttgtctatttagttttagttctttctctaacttatac

SEQ ID NO: 2336 - DNA, 23 bp, Sheeppox virus
ttagttctttctctaacttatac

SEQ ID NO: 2337 - DNA, 24 bp, Sheeppox virus
acttagatgagtcatttaaaactt

SEQ ID NO: 2338 - DNA, 15 bp, Homo sapiens
ttagttctctaactt

SEQ ID NO: 2339 - DNA, 19 bp, Homo sapiens
ttagttctctctctcctac

SEQ ID NO: 2340 - DNA, 23 bp, Homo sapiens
ttacttctttctaccctattata

SEQ ID NO: 2341 - DNA, 72 bp, Sheeppox virus
ccgcatcaccgaccaggcgggcgcggggagcgggctctgctgcgtgttttcgcgcgtgtatggggagtgcgg

SEQ ID NO: 2342 - DNA, 24 bp, Sheeppox virus
ttcgcgcgtgtatggggagtgcgg

SEQ ID NO: 2343 - DNA, 24 bp, Sheeppox virus
tcaccgaccaggcgggcgcgggga

SEQ ID NO: 2344 - DNA, 24 bp, Homo sapiens
ttcgacgcgtggcgctgagtgcgg

SEQ ID NO: 2345 - DNA, 19 bp, Homo sapiens
cctggcgggggcgcgggga

SEQ ID NO: 2346 - DNA, 16 bp, Homo sapiens
cgaccgccgcgcgggg

SEQ ID NO: 2347 - DNA, 16 bp, Homo sapiens
ccgccgcgggcgcggg

SEQ ID NO: 2348 - DNA, 20 bp, Homo sapiens
tcgccgagcaggcgggcggg

SEQ ID NO: 2349 - DNA, 15 bp, Homo sapiens
gacaacggcgcgggg

SEQ ID NO: 2350 - DNA, 17 bp, Homo sapiens
ccggggtgggcgcgggg

SEQ ID NO: 2351 - DNA, 18 bp, Homo sapiens
ccgagggcgggcgcgggg

SEQ ID NO: 2352 - DNA, 16 bp, Homo sapiens
cggccaggcgatggga

SEQ ID NO: 2353 - DNA, 24 bp, Homo sapiens
ccaccggctgcctgggcgcgggga

SEQ ID NO: 2354 - DNA, 21 bp, Homo sapiens
tcaccaaccaggtgggaaggg

SEQ ID NO: 2355 - DNA, 61 bp, Sheeppox virus
cacccgcgcgcgccggccaacacggcctgccttacggccgtggcggtgggcggcgcggggg

SEQ ID NO: 2356 - DNA, 23 bp, Sheeppox virus
cgtggcggtgggcggcgcggggg

SEQ ID NO: 2357 - DNA, 24 bp, Sheeppox virus
gcgcgcgccggccaacacggcctg

SEQ ID NO: 2358 - DNA, 21 bp, Homo sapiens
gtggcggtgggtgggaggggg

SEQ ID NO: 2359 - DNA, 19 bp, Homo sapiens
gtgcggtgggcggaggggg

SEQ ID NO: 2360 - DNA, 18 bp, Homo sapiens
cgggcgtggggcgcgggg

SEQ ID NO: 2361 - DNA, 14 bp, Homo sapiens
gtggcggtggcggg

SEQ ID NO: 2362 - DNA, 17 bp, Homo sapiens
cgtggcgggggtggagg

SEQ ID NO: 2363 - DNA, 26 bp, Homo sapiens
gtggcggtgggactctgcggcggggg

SEQ ID NO: 2364 - DNA, 14 bp, Homo sapiens
ggcggtgggcaggg

SEQ ID NO: 2365 - DNA, 15 bp, Homo sapiens
cgtggggtgggcggg

SEQ ID NO: 2366 - DNA, 20 bp, Homo sapiens
cggggcggtgggcgggcagg

SEQ ID NO: 2367 - DNA, 17 bp, Homo sapiens
ggggcggccgcgcgggg

SEQ ID NO: 2368 - DNA, 15 bp, Homo sapiens
cgtggcggggctggg

SEQ ID NO: 2369 - DNA, 19 bp, Homo sapiens
cggggcggtgggcgggcgg

SEQ ID NO: 2370 - DNA, 18 bp, Homo sapiens
ggcggtggggggcggggg

SEQ ID NO: 2371 - DNA, 18 bp, Homo sapiens
cggggcggtgggccgggg

SEQ ID NO: 2372 - DNA, 19 bp, Homo sapiens
cgggtggtgggcggcccgg

SEQ ID NO: 2373 - DNA, 19 bp, Homo sapiens
tggcggtgggcggccaagg

SEQ ID NO: 2374 - DNA, 21 bp, Homo sapiens
cgcggggaggcggcgcggggg

SEQ ID NO: 2375 - DNA, 18 bp, Homo sapiens
tggcggtgggcggctccg

SEQ ID NO: 2376 - DNA, 20 bp, Homo sapiens
gtggcagtgggggatggggg

SEQ ID NO: 2377 - DNA, 19 bp, Homo sapiens
gcggcgcggggcgcggggg

SEQ ID NO: 2378 - DNA, 19 bp, Homo sapiens
ggggtggccagcgcggggg

SEQ ID NO: 2379 - DNA, 19 bp, Homo sapiens
gcgcgcgacggcaaggtct

SEQ ID NO: 2380 - DNA, 21 bp, Homo sapiens
gcgcgccgctggctgatgccc

SEQ ID NO: 2381 - DNA, 18 bp, Homo sapiens
gcgcgcgctgcccgggct

SEQ ID NO: 2382 - DNA, 28 bp, Homo sapiens
gcgcgcgcctggctgtgaagtcggcctg

SEQ ID NO: 2383 - DNA, 16 bp, Homo sapiens
gcgcccgccggctgcc

SEQ ID NO: 2384 - DNA, 15 bp, Homo sapiens
cgcgcgccggccggc

SEQ ID NO: 2385 - DNA, 17 bp, Homo sapiens
gcccgcgccggccgggc

SEQ ID NO: 2386 - DNA, 18 bp, Homo sapiens
gcgcgcgccggcgagcga

SEQ ID NO: 2387 - DNA, 20 bp, Homo sapiens
gcgccgcgcggcacggcctg

SEQ ID NO: 2388 - DNA, 19 bp, Homo sapiens
gcacgcgggggcgcggcct

SEQ ID NO: 2389 - DNA, 15 bp, Homo sapiens
gccgcgccggctggc

SEQ ID NO: 2390 - DNA, 18 bp, Homo sapiens
gcgcgccgccggcggggc

SEQ ID NO: 2391 - DNA, 16 bp, Homo sapiens
gcgcccgtcggccggc

SEQ ID NO: 2392 - DNA, 73 bp, Sheeppox virus
acgagattgtgaacctgcgcctggagatcgagcgcgcccgcgacgcggactttggggcgttttgccgcttcgt

SEQ ID NO: 2393 - DNA, 24 bp, Sheeppox virus
gcggactttggggcgttttgccgc

SEQ ID NO: 2394 - DNA, 24 bp, Sheeppox virus
cgcctggagatcgagcgcgcccgc

SEQ ID NO: 2395 - DNA, 19 bp, Homo sapiens
gcactttgggaagtgctgc

SEQ ID NO: 2396 - DNA, 18 bp, Homo sapiens
tttggagccttttgttgc

SEQ ID NO: 2397 - DNA, 18 bp, Homo sapiens
gaactttggggcttctgc

SEQ ID NO: 2398 - DNA, 20 bp, Homo sapiens
gcgggctttggggcccctgc

SEQ ID NO: 2399 - DNA, 17 bp, Homo sapiens
gcctggaggccgggccg

SEQ ID NO: 2400 - DNA, 22 bp, Homo sapiens
cgccgggagcgcccgcgcccgc

SEQ ID NO: 2401 - DNA, 22 bp, Homo sapiens
cgccttccctgagcgcgcccgc

SEQ ID NO: 2402 - DNA, 18 bp, Homo sapiens
tggagatctggcagtcac

SEQ ID NO: 2403 - DNA, 23 bp, Homo sapiens
gcctggagctgtctcgtgcctgc

SEQ ID NO: 2404 - DNA, 19 bp, Homo sapiens
gctggggcgccgcgcccgc

SEQ ID NO: 2405 - DNA, 24 bp, Homo sapiens
gcctggagattggctgtgcgggcc

SEQ ID NO: 2406 - DNA, 23 bp, Homo sapiens
cctgggggccgcggtgcgcccgc

SEQ ID NO: 2407 - DNA, 18 bp, Homo sapiens
gcctggaggctccagcgc

SEQ ID NO: 2408 - DNA, 20 bp, Homo sapiens
cgccggagcccgcgcgcccg

SEQ ID NO: 2409 - DNA, 18 bp, Homo sapiens
cctggagattgagttcac

SEQ ID NO: 2410 - DNA, 18 bp, Homo sapiens
cccctggagattgactgc

SEQ ID NO: 2411 - DNA, 75 bp, Sheeppox virus
gcggctcgcgcggcgggtaagcggacgagcctgccgcggcggcggcgggccccgtggacgccgccctcgagccgc

SEQ ID NO: 2412 - DNA, 24 bp, Sheeppox virus
ccccgtggacgccgccctcgagcc

SEQ ID NO: 2413 - DNA, 24 bp, Sheeppox virus
aagcggacgagcctgccgcggcgg

SEQ ID NO: 2414 - DNA, 17 bp, Homo sapiens
ccgtggacgttcgtggc

SEQ ID NO: 2415 - DNA, 25 bp, Homo sapiens
ccgcggacgccgcctggggagagcc

SEQ ID NO: 2416 - DNA, 17 bp, Homo sapiens
cccgtggaacgtcgtgc

SEQ ID NO: 2417 - DNA, 19 bp, Homo sapiens
ccccgtgggtgcgcctagc

SEQ ID NO: 2418 - DNA, 19 bp, Homo sapiens
ccccgggacgccgccgagc

SEQ ID NO: 2419 - DNA, 18 bp, Homo sapiens
ccccgtggcgccccggag

SEQ ID NO: 2420 - DNA, 20 bp, Homo sapiens
ccccgtgggcctgggcgggc

SEQ ID NO: 2421 - DNA, 23 bp, Homo sapiens
ccttgaggacgccgtctctagcc

SEQ ID NO: 2422 - DNA, 21 bp, Homo sapiens
gcggcgggcggcgggcggcgg

SEQ ID NO: 2423 - DNA, 21 bp, Homo sapiens
gcggcgcggcgattgcggcgg

SEQ ID NO: 2424 - DNA, 17 bp, Homo sapiens
gcggcgacgcgtggcgg

SEQ ID NO: 2425 - DNA, 20 bp, Homo sapiens
ggtggtgccggccgccgcgg

SEQ ID NO: 2426 - DNA, 22 bp, Homo sapiens
agtggagtgaggcccgcggcgg

SEQ ID NO: 2427 - DNA, 21 bp, Homo sapiens
ggactcgagctgccgcggcgg

SEQ ID NO: 2428 - DNA, 22 bp, Homo sapiens
aagcggacggcgctgctggtgg

SEQ ID NO: 2429 - DNA, 20 bp, Homo sapiens
ggcgagcgggagcgcggcgg

SEQ ID NO: 2430 - DNA, 19 bp, Homo sapiens
gcggaggggcgcgcggcgg

SEQ ID NO: 2431 - DNA, 21 bp, Homo sapiens
acggcgggcgtcctgcggcgg

SEQ ID NO: 2432 - DNA, 19 bp, Homo sapiens
gcggcgggctgcgcggcgg

SEQ ID NO: 2433 - DNA, 19 bp, Homo sapiens
gcaggcggaggcgcggcgg

SEQ ID NO: 2434 - DNA, 21 bp, Homo sapiens
agcgggcggcgggcgcggcgg

SEQ ID NO: 2435 - DNA, 21 bp, Homo sapiens
gcggagaggcgagcgcggcgg

SEQ ID NO: 2436 - DNA, 22 bp, Homo sapiens
agcggctgcagggccgcggcgg

SEQ ID NO: 2437 - DNA, 18 bp, Homo sapiens
gcggcgggcgggcggcgg

SEQ ID NO: 2438 - DNA, 19 bp, Homo sapiens
gcgggcgcggcggcggcgg

SEQ ID NO: 2439 - DNA, 15 bp, Homo sapiens
agggacgagcgcggc

SEQ ID NO: 2440 - DNA, 19 bp, Homo sapiens
gcggatggctacgcggcgg

SEQ ID NO: 2441 - DNA, 17 bp, Homo sapiens
gcggcgggaggcggcgg

SEQ ID NO: 2442 - DNA, 19 bp, Homo sapiens
gcgaacgagggcgcggtgg

SEQ ID NO: 2443 - DNA, 19 bp, Homo sapiens
gcggcgagcgcaacggcgg

SEQ ID NO: 2444 - DNA, 21 bp, Homo sapiens
aaggggcgggcgccgcggcgg

SEQ ID NO: 2445 - DNA, 20 bp, Homo sapiens
agcggcgggcacggcggcgg

SEQ ID NO: 2446 - DNA, 84 bp, Sheeppox virus
cgatgaatactttaatgacgttatacctctacataatgcttatagcgtgcaacgttgatataatgtcttatctcgtatatattg

SEQ ID NO: 2447 - DNA, 24 bp, Sheeppox virus
tataatgtcttatctcgtatatat

SEQ ID NO: 2448 - DNA, 24 bp, Sheeppox virus
tttaatgacgttatacctctacat

SEQ ID NO: 2449 - DNA, 22 bp, Homo sapiens
tttagggaaaatacctctacat

SEQ ID NO: 2450 - DNA, 19 bp, Homo sapiens
tgattgacactctctacat

SEQ ID NO: 2451 - DNA, 66 bp, Sheeppox virus
tgagtttgtccacaagtttgagggcaagaacctgtttgcctctgtagactactgtgtaaagactca

SEQ ID NO: 2452 - DNA, 24 bp, Sheeppox virus
tccacaagtttgagggcaagaacc

SEQ ID NO: 2453 - DNA, 24 bp, Sheeppox virus
tctgtagactactgtgtaaagact

SEQ ID NO: 2454 - DNA, 18 bp, Homo sapiens
tctccaaggacggcgaga

SEQ ID NO: 2455 - DNA, 19 bp, Homo sapiens
tccacaaagggcaaggacc

SEQ ID NO: 2456 - DNA, 18 bp, Homo sapiens
cataagtttgagccaaaa

SEQ ID NO: 2457 - DNA, 19 bp, Homo sapiens
tccacaaggttgcaagaac

SEQ ID NO: 2458 - DNA, 17 bp, Homo sapiens
caagcctggcaggaacc

SEQ ID NO: 2459 - DNA, 19 bp, Homo sapiens
tccaccccagggtgagggc

SEQ ID NO: 2460 - DNA, 15 bp, Homo sapiens
cacttgagggcagga

SEQ ID NO: 2461 - DNA, 24 bp, Homo sapiens
tccacagtgaagcaggcaagaacc

SEQ ID NO: 2462 - DNA, 18 bp, Homo sapiens
acaagctttggcaggaac

SEQ ID NO: 2463 - DNA, 20 bp, Homo sapiens
ccactatgggggcaggagcc

SEQ ID NO: 2464 - DNA, 18 bp, Homo sapiens
tccagggtggaagcaaga

SEQ ID NO: 2465 - DNA, 18 bp, Homo sapiens
tccatgagtttgagacca

SEQ ID NO: 2466 - DNA, 18 bp, Homo sapiens
caaaagaaagggtaagaa

SEQ ID NO: 2467 - DNA, 19 bp, Homo sapiens
caggagtttgagacgaacc

SEQ ID NO: 2468 - DNA, 16 bp, Homo sapiens
cacaggctgacaagaa

SEQ ID NO: 2469 - DNA, 23 bp, Homo sapiens
cccgcaccttgagggtgggagcc

SEQ ID NO: 2470 - DNA, 22 bp, Homo sapiens
tgaggctatgcaaataaagact

SEQ ID NO: 2471 - DNA, 19 bp, Homo sapiens
tgaggatgtggtaaagact

SEQ ID NO: 2472 - DNA, 21 bp, Homo sapiens
tctgtagactcaacacaggga

SEQ ID NO: 2473 - DNA, 65 bp, Sheeppox virus
gccgagtggcggtcaacagcctcgcgccgggagagcccggtgcgaggcgcccggtgccgcttggc

SEQ ID NO: 2474 - DNA, 17 bp, Sheeppox virus
gcccggtgccgcttggc

SEQ ID NO: 2475 - DNA, 24 bp, Sheeppox virus
agtggcggtcaacagcctcgcgcc

SEQ ID NO: 2476 - DNA, 19 bp, Homo sapiens
gcccagtgcccaaattggc

SEQ ID NO: 2477 - DNA, 18 bp, Homo sapiens
gctcggccccgagcttgg

SEQ ID NO: 2478 - DNA, 19 bp, Homo sapiens
gcttggtcgcccagcttgg

SEQ ID NO: 2479 - DNA, 20 bp, Homo sapiens
gcaccggatccgagcttggc

SEQ ID NO: 2480 - DNA, 18 bp, Homo sapiens
gcccggctgctgcggggc

SEQ ID NO: 2481 - DNA, 18 bp, Homo sapiens
gcccagtgccccgggggc

SEQ ID NO: 2482 - DNA, 20 bp, Homo sapiens
acccggcacctcctgcttgg

SEQ ID NO: 2483 - DNA, 18 bp, Homo sapiens
gcccgctgccacgctggc

SEQ ID NO: 2484 - DNA, 18 bp, Homo sapiens
gctcggcgccatcttggc

SEQ ID NO: 2485 - DNA, 17 bp, Homo sapiens
gtggcggcaacggccgc

SEQ ID NO: 2486 - DNA, 18 bp, Homo sapiens
agtggtggcagcggctgc

SEQ ID NO: 2487 - DNA, 17 bp, Homo sapiens
gtggcggtggcgcccgc

SEQ ID NO: 2488 - DNA, 20 bp, Homo sapiens
gtggcggtggcggcggcggc

SEQ ID NO: 2489 - DNA, 17 bp, Homo sapiens
gtggcggtggcggcggc

SEQ ID NO: 2490 - DNA, 20 bp, Homo sapiens
ggtagcccggcagcctcgcg

SEQ ID NO: 2491 - DNA, 19 bp, Homo sapiens
agtggcggatgacggcgtc

SEQ ID NO: 2492 - DNA, 18 bp, Homo sapiens
agtggcggctagcgccgc

SEQ ID NO: 2493 - DNA, 17 bp, Homo sapiens
gtggcggcggcagcacc

SEQ ID NO: 2494 - DNA, 22 bp, Homo sapiens
gtggcggtggcgacggcggcgc

SEQ ID NO: 2495 - DNA, 21 bp, Homo sapiens
agtggcggcggcggctgcggc

SEQ ID NO: 2496 - DNA, 17 bp, Homo sapiens
gtggcggcggcggcgcg

SEQ ID NO: 2497 - DNA, 23 bp, Homo sapiens
agaggtttaagcagcctcgtgcc

SEQ ID NO: 2498 - DNA, 16 bp, Homo sapiens
gtggcagtcagcggcg

SEQ ID NO: 2499 - DNA, 20 bp, Homo sapiens
agggtgggcagcctcgtgcc

SEQ ID NO: 2500 - DNA, 16 bp, Homo sapiens
gtggcggcggcggcgc

SEQ ID NO: 2501 - DNA, 17 bp, Homo sapiens
gtggcggcggctcgcgc

SEQ ID NO: 2502 - DNA, 20 bp, Homo sapiens
agtggtggtaacggggggcc

SEQ ID NO: 2503 - DNA, 17 bp, Homo sapiens
agtggcggcagcggcgc

SEQ ID NO: 2504 - DNA, 19 bp, Homo sapiens
agtggcggccagcaggggc

SEQ ID NO: 2505 - DNA, 18 bp, Homo sapiens
ggggctgcagcctcgcgc

SEQ ID NO: 2506 - DNA, 20 bp, Homo sapiens
gtggcggcggcggcgacgac

SEQ ID NO: 2507 - DNA, 19 bp, Homo sapiens
ggcggtggctgcctcgtgc

SEQ ID NO: 2508 - DNA, 16 bp, Homo sapiens
gtggcggtggcactgc

SEQ ID NO: 2509 - DNA, 19 bp, Homo sapiens
agtggggtcgtgctcgcgc

SEQ ID NO: 2510 - DNA, 20 bp, Homo sapiens
gtggcggcggcggcggcggc

SEQ ID NO: 2511 - DNA, 20 bp, Homo sapiens
gtggcggttagggtcgggcc

SEQ ID NO: 2512 - DNA, 15 bp, Homo sapiens
agcggcgagcctcgg

SEQ ID NO: 2513 - DNA, 22 bp, Homo sapiens
agtggcggcaatggcctcagcc

SEQ ID NO: 2514 - DNA, 21 bp, Homo sapiens
agtggcggcaggccctgcgcc

SEQ ID NO: 2515 - DNA, 78 bp, Sheeppox virus
ttgcgactggtgcaacaatggtttcgctgaaggtttgagacatggcgtgagacatggtgtgacctaaaccattcgcaa

SEQ ID NO: 2516 - DNA, 24 bp, Sheeppox virus
tggcgtgagacatggtgtgaccta

SEQ ID NO: 2517 - DNA, 24 bp, Sheeppox virus
actggtgcaacaatggtttcgctg

SEQ ID NO: 2518 - DNA, 19 bp, Homo sapiens
tgattccatggtgtggcct

SEQ ID NO: 2519 - DNA, 16 bp, Homo sapiens
tggcgtggtggcatga

SEQ ID NO: 2520 - DNA, 24 bp, Homo sapiens
tggtgtgaatggaaggttggtctg

SEQ ID NO: 2521 - DNA, 24 bp, Homo sapiens
tggcatgaggctgccagtggcttg

SEQ ID NO: 2522 - DNA, 21 bp, Homo sapiens
tggtgtggacacagcagacct

SEQ ID NO: 2523 - DNA, 20 bp, Homo sapiens
tggtgtgaggttccagtttg

SEQ ID NO: 2524 - DNA, 19 bp, Homo sapiens
tggtttgggaaacggtgtg

SEQ ID NO: 2525 - DNA, 17 bp, Homo sapiens
gcgtgagatgtgtccct

SEQ ID NO: 2526 - DNA, 22 bp, Homo sapiens
tggtgtgaagtgtgggattcct

SEQ ID NO: 2527 - DNA, 65 bp, Sheeppox virus
gtcccagcgcgcgaattcgtggacgccgtctggcagccgcggcggacgtcgctggcgctggtgat

SEQ ID NO: 2528 - DNA, 24 bp, Sheeppox virus
cagccgcggcggacgtcgctggcg

SEQ ID NO: 2529 - DNA, 24 bp, Sheeppox virus
cagcgcgcgaattcgtggacgccg

SEQ ID NO: 2530 - DNA, 22 bp, Homo sapiens
gctgctggcgctagcgctggcg

SEQ ID NO: 2531 - DNA, 19 bp, Homo sapiens
ccgccgcggcgctgctggc

SEQ ID NO: 2532 - DNA, 21 bp, Homo sapiens
gcggcggcggtgggactggcg

SEQ ID NO: 2533 - DNA, 19 bp, Homo sapiens
cagccgcgggggcgcgggc

SEQ ID NO: 2534 - DNA, 15 bp, Homo sapiens
cagccgcggcggcgg

SEQ ID NO: 2535 - DNA, 19 bp, Homo sapiens
cagccgcgtggggctctgg

SEQ ID NO: 2536 - DNA, 19 bp, Homo sapiens
gctgcggcggcggatggcg

SEQ ID NO: 2537 - DNA, 14 bp, Homo sapiens
accgcggcgggcgg

SEQ ID NO: 2538 - DNA, 19 bp, Homo sapiens
gccgcggcaggtgagggcg

SEQ ID NO: 2539 - DNA, 18 bp, Homo sapiens
cagctccggctcgctggc

SEQ ID NO: 2540 - DNA, 21 bp, Homo sapiens
gccgcggcgggcagtaagctg

SEQ ID NO: 2541 - DNA, 15 bp, Homo sapiens
cagctgcggcggcgg

SEQ ID NO: 2542 - DNA, 19 bp, Homo sapiens
cagccgcggcggtcgcggc

SEQ ID NO: 2543 - DNA, 21 bp, Homo sapiens
gctgcggcgagcaaggaggcg

SEQ ID NO: 2544 - DNA, 20 bp, Homo sapiens
gccgcggccggaacctggcg

SEQ ID NO: 2545 - DNA, 18 bp, Homo sapiens
cgcggcggcggtctggcg

SEQ ID NO: 2546 - DNA, 19 bp, Homo sapiens
cagccgccggctttgctgg

SEQ ID NO: 2547 - DNA, 19 bp, Homo sapiens
gccgcgagagaggacgccg

SEQ ID NO: 2548 - DNA, 17 bp, Homo sapiens
gccgcgaattcgcggcc

SEQ ID NO: 2549 - DNA, 17 bp, Homo sapiens
gccgcggacctgggcgc

SEQ ID NO: 2550 - DNA, 16 bp, Homo sapiens
gcgcgcgagacggcgc

SEQ ID NO: 2551 - DNA, 24 bp, Homo sapiens
cagcgggcgagagacgagacgccg

SEQ ID NO: 2552 - DNA, 23 bp, Homo sapiens
gcgcgcggcgagtgtggacgccg

SEQ ID NO: 2553 - DNA, 86 bp, Sheeppox virus
gctgctcttgctgctcttgctgctcttgctgctcttgctgctcttgctgctcttgctgctcttgctgctcttgctgctcttgctgc

SEQ ID NO: 2554 - DNA, 24 bp, Sheeppox virus
tcttgctgctcttgctgctcttgc

SEQ ID NO: 2555 - DNA, 24 bp, Sheeppox virus
ttgctgctcttgctgctcttgctg

SEQ ID NO: 2556 - DNA, 22 bp, Homo sapiens
ctgctgctccccgccttcttgc

SEQ ID NO: 2557 - DNA, 23 bp, Homo sapiens
ctccccgcttcttgctgcttttg

SEQ ID NO: 2558 - DNA, 16 bp, Homo sapiens
ttgctgcttattcttg

SEQ ID NO: 2559 - DNA, 19 bp, Homo sapiens
tcttcctgggctgctcttg

SEQ ID NO: 2560 - DNA, 20 bp, Homo sapiens
tctgctgctctttcgccttg

SEQ ID NO: 2561 - DNA, 18 bp, Homo sapiens
gctgctcttaaacatttg

SEQ ID NO: 2562 - DNA, 18 bp, Homo sapiens
tcttgttacttcttttgc

SEQ ID NO: 2563 - DNA, 74 bp, Sheeppox virus
ctggccgaccgcggcggcggcgagcgcttccgcgtggcgagcgcggcggttgcgccgctgcagcggctggccgg

SEQ ID NO: 2564 - DNA, 24 bp, Sheeppox virus
ggttgcgccgctgcagcggctggc

SEQ ID NO: 2565 - DNA, 24 bp, Sheeppox virus
cggcggcggcgagcgcttccgcgt

SEQ ID NO: 2566 - DNA, 19 bp, Homo sapiens
ggctgcgctgctgtgtggc

SEQ ID NO: 2567 - DNA, 22 bp, Homo sapiens
ggtggtggctgcagcggctggc

SEQ ID NO: 2568 - DNA, 24 bp, Homo sapiens
ggttgggctgcgatctcggctggc

SEQ ID NO: 2569 - DNA, 18 bp, Homo sapiens
ggcggcggtgtggcggcg

SEQ ID NO: 2570 - DNA, 22 bp, Homo sapiens
ggcggcggcggcgacatcgcgt

SEQ ID NO: 2571 - DNA, 21 bp, Homo sapiens
cggcggcggcgaggccgggcg

SEQ ID NO: 2572 - DNA, 23 bp, Homo sapiens
cggaggcggctcggcttccgcgt

SEQ ID NO: 2573 - DNA, 23 bp, Homo sapiens
cggcggtggcgcggggcgcgcgt

SEQ ID NO: 2574 - DNA, 20 bp, Homo sapiens
cggcggcggcggccgctgcc

SEQ ID NO: 2575 - DNA, 18 bp, Homo sapiens
cggcggcggtggcgctgc

SEQ ID NO: 2576 - DNA, 19 bp, Homo sapiens
cggcggcgggcgggcgcct

SEQ ID NO: 2577 - DNA, 16 bp, Homo sapiens
ggaggcgtgcttccgg

SEQ ID NO: 2578 - DNA, 21 bp, Homo sapiens
cggcggctgcgggactcgcgt

SEQ ID NO: 2579 - DNA, 21 bp, Homo sapiens
cggcggcggtgagtgaccgcg

SEQ ID NO: 2580 - DNA, 20 bp, Homo sapiens
cggcggcggcggcgctggcc

SEQ ID NO: 2581 - DNA, 18 bp, Homo sapiens
cggcggggtgagcggctc

SEQ ID NO: 2582 - DNA, 21 bp, Homo sapiens
cggcggcggcggcggctgcgt

SEQ ID NO: 2583 - DNA, 21 bp, Homo sapiens
cggcggcggcggcgacgacgt

SEQ ID NO: 2584 - DNA, 23 bp, Homo sapiens
cggcggcggcggcggcggcgcgt

SEQ ID NO: 2585 - DNA, 18 bp, Homo sapiens
ggcggcggcggccgctcc

SEQ ID NO: 2586 - DNA, 24 bp, Homo sapiens
cggcggcggcagcggctgctgcgt

SEQ ID NO: 2587 - DNA, 21 bp, Homo sapiens
cggcggcggcggcgctcggac

SEQ ID NO: 2588 - DNA, 20 bp, Homo sapiens
cggcggcggtgggcggaccg

SEQ ID NO: 2589 - DNA, 18 bp, Homo sapiens
cggcggggcgagcgcgcg

SEQ ID NO: 2590 - DNA, 16 bp, Homo sapiens
ggcggcggcggctgcg

SEQ ID NO: 2591 - DNA, 27 bp, Homo sapiens
cggcggcggcggggcttacgcggaagc

SEQ ID NO: 2592 - DNA, 21 bp, Homo sapiens
cggcggcgcgggcgtcagcgt

SEQ ID NO: 2593 - DNA, 66 bp, Sheeppox virus
gatctcaaagaccgatatggaaactcaaaccgttatcgggtacaataaaccatgactgtccagatt

SEQ ID NO: 2594 - DNA, 24 bp, Sheeppox virus
tcaaagaccgatatggaaactcaa

SEQ ID NO: 2595 - DNA, 24 bp, Sheeppox virus
tacaataaaccatgactgtccaga

SEQ ID NO: 2596 - DNA, 19 bp, Homo sapiens
aaagacagaggaaaaactc

SEQ ID NO: 2597 - DNA, 21 bp, Homo sapiens
tcaaagactttatgaagctca

SEQ ID NO: 2598 - DNA, 20 bp, Homo sapiens
tcaaagactaatatgtctca

SEQ ID NO: 2599 - DNA, 20 bp, Homo sapiens
ccacttatatggaaactcaa

SEQ ID NO: 2600 - DNA, 19 bp, Homo sapiens
aggccaacacggggaactc

SEQ ID NO: 2601 - DNA, 14 bp, Homo sapiens
aaagaccagaaact

SEQ ID NO: 2602 - DNA, 21 bp, Homo sapiens
tcaaagactgagtggaagccc

SEQ ID NO: 2603 - DNA, 18 bp, Homo sapiens
aagaccgatgaaaactca

SEQ ID NO: 2604 - DNA, 18 bp, Homo sapiens
tcaagagccagaaactca

SEQ ID NO: 2605 - DNA, 18 bp, Homo sapiens
ccgagaaatggaaactca

SEQ ID NO: 2606 - DNA, 21 bp, Homo sapiens
tcatggaccaatagaaattca

SEQ ID NO: 2607 - DNA, 21 bp, Homo sapiens
ccaaggtccctgggaaactca

SEQ ID NO: 2608 - DNA, 19 bp, Homo sapiens
agactgcagggaaactcaa

SEQ ID NO: 2609 - DNA, 21 bp, Homo sapiens
tacagcagagaccctgtccag

SEQ ID NO: 2610 - DNA, 18 bp, Homo sapiens
aataaacctgagttcaga

SEQ ID NO: 2611 - DNA, 25 bp, Homo sapiens
tacaaaaaaccatggcttctctgga

SEQ ID NO: 2612 - DNA, 21 bp, Homo sapiens
tacaatcaggtactgtccaga

SEQ ID NO: 2613 - DNA, 22 bp, Homo sapiens
caacagaaaccccctgtccaga

SEQ ID NO: 2614 - DNA, 83 bp, Sheeppox virus
cagtcccgttgcccatgagcaggtacactttggttcaggaaactgcccaagacatcatgtacactccgatgggaaaggaactg

SEQ ID NO: 2615 - DNA, 24 bp, Sheeppox virus
tgcccatgagcaggtacactttgg

SEQ ID NO: 2616 - DNA, 24 bp, Sheeppox virus
gcccaagacatcatgtacactccg

SEQ ID NO: 2617 - DNA, 21 bp, Homo sapiens
tgcctgtgagcagggtcccgg

SEQ ID NO: 2618 - DNA, 23 bp, Homo sapiens
tgcctgtaatcccagcactttgg

SEQ ID NO: 2619 - DNA, 23 bp, Homo sapiens
tgcctgtaatcccaacactttgg

SEQ ID NO: 2620 - DNA, 23 bp, Homo sapiens
tgcctgtaatctcagcactttgg

SEQ ID NO: 2621 - DNA, 23 bp, Homo sapiens
tgcctgtaatcctggcactttgg

SEQ ID NO: 2622 - DNA, 23 bp, Homo sapiens
tgcctataatctcagcactttgg

SEQ ID NO: 2623 - DNA, 23 bp, Homo sapiens
tgcctgtaatatcagcactttgg

SEQ ID NO: 2624 - DNA, 18 bp, Homo sapiens
tgccttggaagcactttg

SEQ ID NO: 2625 - DNA, 21 bp, Homo sapiens
tgtccattgcagacactttgg

SEQ ID NO: 2626 - DNA, 23 bp, Homo sapiens
tgcctgtaatccctgcactttgg

SEQ ID NO: 2627 - DNA, 23 bp, Homo sapiens
tgcctgtaatcctaacactttgg

SEQ ID NO: 2628 - DNA, 20 bp, Homo sapiens
gccgtgagattgcactttgg

SEQ ID NO: 2629 - DNA, 24 bp, Homo sapiens
tgctgatgacatcaaacactttgg

SEQ ID NO: 2630 - DNA, 18 bp, Homo sapiens
tgcctatgaggcactttg

SEQ ID NO: 2631 - DNA, 23 bp, Homo sapiens
tgcctgtcatcccagcactttgg

SEQ ID NO: 2632 - DNA, 23 bp, Homo sapiens
tgcctgtaatcctagcactttgg

SEQ ID NO: 2633 - DNA, 23 bp, Homo sapiens
tgcttgtaattctaacactttgg

SEQ ID NO: 2634 - DNA, 19 bp, Homo sapiens
tgtccagagcaggtctgtg

SEQ ID NO: 2635 - DNA, 23 bp, Homo sapiens
tgcctgtgatcccagcactttgg

SEQ ID NO: 2636 - DNA, 19 bp, Homo sapiens
tgcctatgtcagcactttg

SEQ ID NO: 2637 - DNA, 23 bp, Homo sapiens
tgcccgtaatcccagcactttgg

SEQ ID NO: 2638 - DNA, 20 bp, Homo sapiens
gcttaaaacatcatgtttcc

SEQ ID NO: 2639 - DNA, 21 bp, Homo sapiens
gcccaagaatgtcgtgtacct

SEQ ID NO: 2640 - DNA, 18 bp, Homo sapiens
gcccggagcacacactcc

SEQ ID NO: 2641 - DNA, 16 bp, Homo sapiens
ccaagacaatgatctc

SEQ ID NO: 2642 - DNA, 97 bp, Sheeppox virus
gcgcagagctgtaccagcgcctggacgcgctgttgctgccgctgcagggcttcgcggggctgcgcgcggcgcccggcgcgctggagcggctgtgcgc

SEQ ID NO: 2643 - DNA, 24 bp, Sheeppox virus
taccagcgcctggacgcgctgttg

SEQ ID NO: 2644 - DNA, 24 bp, Sheeppox virus
ctgcgcgcggcgcccggcgcgctg

SEQ ID NO: 2645 - DNA, 17 bp, Homo sapiens
cagcgcctggggtgctg

SEQ ID NO: 2646 - DNA, 17 bp, Homo sapiens
ccagcgccgggtccatt

SEQ ID NO: 2647 - DNA, 17 bp, Homo sapiens
cgcgcggcgctcggccg

SEQ ID NO: 2648 - DNA, 22 bp, Homo sapiens
ctgcgcgctggccaccgcgctg

SEQ ID NO: 2649 - DNA, 22 bp, Homo sapiens
ctgcgcgcgcgtctcactgctg

SEQ ID NO: 2650 - DNA, 20 bp, Homo sapiens
ctgcgcgcggcgactggacg

SEQ ID NO: 2651 - DNA, 21 bp, Homo sapiens
ctgggcggccccggcgcgctg

SEQ ID NO: 2652 - DNA, 18 bp, Homo sapiens
ctgcgcgcggctccggcg

SEQ ID NO: 2653 - DNA, 24 bp, Homo sapiens
gcgcggcgtcccgccttcgcgctg

SEQ ID NO: 2654 - DNA, 17 bp, Homo sapiens
cgcgcggcgcccgagct

SEQ ID NO: 2655 - DNA, 18 bp, Homo sapiens
gcgcgcggcgtgcccgct

SEQ ID NO: 2656 - DNA, 20 bp, Homo sapiens
ctgtctgcggtgctcggccg

SEQ ID NO: 2657 - DNA, 24 bp, Homo sapiens
tgcgcgcgggcttcctgcagcgcc

SEQ ID NO: 2658 - DNA, 21 bp, Homo sapiens
ctgcgcgccgcgcctccgctg

SEQ ID NO: 2659 - DNA, 64 bp, Sheeppox virus
gggccatggtcaaggcgtctggaaactggccatccactttggccacagccgccgtcgccatccc

SEQ ID NO: 2660 - DNA, 19 bp, Sheeppox virus
cagccgccgtcgccatccc

SEQ ID NO: 2661 - DNA, 24 bp, Sheeppox virus
aggcgtctggaaactggccatcca

SEQ ID NO: 2662 - DNA, 18 bp, Homo sapiens
cagcactggggccatccc

SEQ ID NO: 2663 - DNA, 18 bp, Homo sapiens
cagccaccggcctgtccc

SEQ ID NO: 2664 - DNA, 18 bp, Homo sapiens
acccccacccgccatccc

SEQ ID NO: 2665 - DNA, 18 bp, Homo sapiens
cagccgccgatcagggcc

SEQ ID NO: 2666 - DNA, 17 bp, Homo sapiens
cagtaccccgccatccc

SEQ ID NO: 2667 - DNA, 14 bp, Homo sapiens
cagccgccagctcc

SEQ ID NO: 2668 - DNA, 18 bp, Homo sapiens
caccgtcaggaccgtccc

SEQ ID NO: 2669 - DNA, 18 bp, Homo sapiens
gccgctgccgccgccatc

SEQ ID NO: 2670 - DNA, 17 bp, Homo sapiens
cagccgccgccgcctcc

SEQ ID NO: 2671 - DNA, 18 bp, Homo sapiens
cagccgccatctagagcc

SEQ ID NO: 2672 - DNA, 16 bp, Homo sapiens
cagccgcctcacaccc

SEQ ID NO: 2673 - DNA, 15 bp, Homo sapiens
agccccagccatccc

SEQ ID NO: 2674 - DNA, 15 bp, Homo sapiens
agcgccgccgatccc

SEQ ID NO: 2675 - DNA, 18 bp, Homo sapiens
gcctgctgtcgccatccc

SEQ ID NO: 2676 - DNA, 15 bp, Homo sapiens
agccgccgggctccc

SEQ ID NO: 2677 - DNA, 17 bp, Homo sapiens
cagcagccgccacttcc

SEQ ID NO: 2678 - DNA, 17 bp, Homo sapiens
cagccgccaggccttcc

SEQ ID NO: 2679 - DNA, 17 bp, Homo sapiens
cagccgccgccgccccc

SEQ ID NO: 2680 - DNA, 16 bp, Homo sapiens
cagccgccgccgctcc

SEQ ID NO: 2681 - DNA, 16 bp, Homo sapiens
cagctcaccaccatcc

SEQ ID NO: 2682 - DNA, 18 bp, Homo sapiens
gcccgccaaaaccgtccc

SEQ ID NO: 2683 - DNA, 19 bp, Homo sapiens
gccgccgcccggccgtccc

SEQ ID NO: 2684 - DNA, 16 bp, Homo sapiens
cagccagaaccatccc

SEQ ID NO: 2685 - DNA, 20 bp, Homo sapiens
cagccgccgctcgcaagccc

SEQ ID NO: 2686 - DNA, 21 bp, Homo sapiens
ccgccggggtcccgctatccc

SEQ ID NO: 2687 - DNA, 18 bp, Homo sapiens
ccgccgccgccgggtccc

SEQ ID NO: 2688 - DNA, 19 bp, Homo sapiens
cagccgccttccaaagccc

SEQ ID NO: 2689 - DNA, 17 bp, Homo sapiens
cagccaccctctgtccc

SEQ ID NO: 2690 - DNA, 17 bp, Homo sapiens
cagccaccttcatatcc

SEQ ID NO: 2691 - DNA, 17 bp, Homo sapiens
cagccgcctcaggttcc

SEQ ID NO: 2692 - DNA, 16 bp, Homo sapiens
cagcgccgccgctccc

SEQ ID NO: 2693 - DNA, 16 bp, Homo sapiens
cagccaccagcatccc

SEQ ID NO: 2694 - DNA, 18 bp, Homo sapiens
gccaccgtgcacagtccc

SEQ ID NO: 2695 - DNA, 18 bp, Homo sapiens
gcttgaccacgccatccc

SEQ ID NO: 2696 - DNA, 18 bp, Homo sapiens
cagcgcgccgccagctcc

SEQ ID NO: 2697 - DNA, 17 bp, Homo sapiens
cagccgccgccgcagcc

SEQ ID NO: 2698 - DNA, 16 bp, Homo sapiens
agccgccgcagatccc

SEQ ID NO: 2699 - DNA, 20 bp, Homo sapiens
cagccgccatcgccccgtcc

SEQ ID NO: 2700 - DNA, 18 bp, Homo sapiens
agccaccgccacttgtcc

SEQ ID NO: 2701 - DNA, 18 bp, Homo sapiens
gcctgtctttgccatccc

SEQ ID NO: 2702 - DNA, 17 bp, Homo sapiens
cagaccctggccatccc

SEQ ID NO: 2703 - DNA, 18 bp, Homo sapiens
cagccgccggaggctccc

SEQ ID NO: 2704 - DNA, 14 bp, Homo sapiens
cagccaccgcctcc

SEQ ID NO: 2705 - DNA, 21 bp, Homo sapiens
cagccgctgcacggcgcgtcc

SEQ ID NO: 2706 - DNA, 18 bp, Homo sapiens
gccgccgcaccacgttcc

SEQ ID NO: 2707 - DNA, 18 bp, Homo sapiens
gccgtcgcggttcatccc

SEQ ID NO: 2708 - DNA, 16 bp, Homo sapiens
cagctggcaccatccc

SEQ ID NO: 2709 - DNA, 18 bp, Homo sapiens
cagcctgtcacatgtccc

SEQ ID NO: 2710 - DNA, 20 bp, Homo sapiens
gccgccctccccgccgtccc

SEQ ID NO: 2711 - DNA, 19 bp, Homo sapiens
cagtgtcctcagccatccc

SEQ ID NO: 2712 - DNA, 15 bp, Homo sapiens
cagccgccggcttcc

SEQ ID NO: 2713 - DNA, 18 bp, Homo sapiens
cagctgctgcctgccgtc

SEQ ID NO: 2714 - DNA, 18 bp, Homo sapiens
accgccgcgcagcgtccc

SEQ ID NO: 2715 - DNA, 17 bp, Homo sapiens
agctcacataccatccc

SEQ ID NO: 2716 - DNA, 16 bp, Homo sapiens
caggcggagccatccc

SEQ ID NO: 2717 - DNA, 19 bp, Homo sapiens
cagctgcttccaaaatccc

SEQ ID NO: 2718 - DNA, 16 bp, Homo sapiens
cagccgccgccgcgcc

SEQ ID NO: 2719 - DNA, 18 bp, Homo sapiens
cagccgccgccgcctccc

SEQ ID NO: 2720 - DNA, 16 bp, Homo sapiens
cagctgccgccgcccc

SEQ ID NO: 2721 - DNA, 17 bp, Homo sapiens
cagcagtcgccacttcc

SEQ ID NO: 2722 - DNA, 19 bp, Homo sapiens
cagccgccgctgcaactcc

SEQ ID NO: 2723 - DNA, 16 bp, Homo sapiens
caaccgccggcgtccc

SEQ ID NO: 2724 - DNA, 19 bp, Homo sapiens
accgccgccggctcgttcc

SEQ ID NO: 2725 - DNA, 19 bp, Homo sapiens
tgaccgcagttgccatccc

SEQ ID NO: 2726 - DNA, 18 bp, Homo sapiens
cactcgtgaaaccatccc

SEQ ID NO: 2727 - DNA, 20 bp, Homo sapiens
cagccgcccgccgctgtccc

SEQ ID NO: 2728 - DNA, 17 bp, Homo sapiens
cagcgccgccggctccc

SEQ ID NO: 2729 - DNA, 17 bp, Homo sapiens
cagctcgccaccatccc

SEQ ID NO: 2730 - DNA, 18 bp, Homo sapiens
ccgccgccgcgggctccc

SEQ ID NO: 2731 - DNA, 18 bp, Homo sapiens
ccgccgccgccagctccc

SEQ ID NO: 2732 - DNA, 17 bp, Homo sapiens
cagccgccccttgtccc

SEQ ID NO: 2733 - DNA, 18 bp, Homo sapiens
ccgccgccgccgagtccc

SEQ ID NO: 2734 - DNA, 19 bp, Homo sapiens
cagtcccctgagccatccc

SEQ ID NO: 2735 - DNA, 18 bp, Homo sapiens
ccgccgcctccggatccc

SEQ ID NO: 2736 - DNA, 22 bp, Homo sapiens
agggtctggaaactggggccca

SEQ ID NO: 2737 - DNA, 15 bp, Homo sapiens
aggctctggaccatc

SEQ ID NO: 2738 - DNA, 19 bp, Homo sapiens
agctgtctgggaactgagc

SEQ ID NO: 2739 - DNA, 22 bp, Homo sapiens
aggcttctggaaacttggcctc

SEQ ID NO: 2740 - DNA, 18 bp, Homo sapiens
ggcgcctgggagctcccc

SEQ ID NO: 2741 - DNA, 16 bp, Homo sapiens
aggtgggttggccatc

SEQ ID NO: 2742 - DNA, 19 bp, Homo sapiens
gtctggaagtgtgtgtcca

SEQ ID NO: 2743 - DNA, 17 bp, Homo sapiens
ggcgtctagatctcatc

SEQ ID NO: 2744 - DNA, 16 bp, Homo sapiens
ggttctggtggccatc

SEQ ID NO: 2745 - DNA, 20 bp, Homo sapiens
ggtgtcacctcctggccatc

SEQ ID NO: 2746 - DNA, 21 bp, Homo sapiens
ggcgcctggaaatgagctcca

SEQ ID NO: 2747 - DNA, 20 bp, Homo sapiens
aggcgtcgggggctgcggcc

SEQ ID NO: 2748 - DNA, 19 bp, Homo sapiens
aggggagagattggccatc

SEQ ID NO: 2749 - DNA, 16 bp, Homo sapiens
ggagtctggaagctcc

SEQ ID NO: 2750 - DNA, 20 bp, Homo sapiens
aggcgctggaagctcagcca

SEQ ID NO: 2751 - DNA, 18 bp, Homo sapiens
ggtttctggaaacttccc

SEQ ID NO: 2752 - DNA, 16 bp, Homo sapiens
aggctcattggccatc

SEQ ID NO: 2753 - DNA, 21 bp, Homo sapiens
ggcatctgggggcctcttcca

SEQ ID NO: 2754 - DNA, 19 bp, Homo sapiens
aggcgtctaggaatttctg

SEQ ID NO: 2755 - DNA, 18 bp, Homo sapiens
aggtatctggaatgttca

SEQ ID NO: 2756 - DNA, 23 bp, Homo sapiens
ggcgtctgggggtgggggcctcc

SEQ ID NO: 2757 - DNA, 97 bp, Sheeppox virus
aagtggaccgggaggaccgaggaagagtctttcctgatctctgacatgatgggtcagatcaagacaggttggattagatctgggcccccgtcctctt

SEQ ID NO: 2758 - DNA, 21 bp, Sheeppox virus
gatctgggcccccgtcctctt

SEQ ID NO: 2759 - DNA, 24 bp, Sheeppox virus
aggaagagtctttcctgatctctg

SEQ ID NO: 2760 - DNA, 17 bp, Homo sapiens
ctgggcttcatcctcct

SEQ ID NO: 2761 - DNA, 14 bp, Homo sapiens
tctgagcctcctct

SEQ ID NO: 2762 - DNA, 24 bp, Homo sapiens
gatctaggttcaagctgtcttctt

SEQ ID NO: 2763 - DNA, 17 bp, Homo sapiens
tctgggttggtcctctt

SEQ ID NO: 2764 - DNA, 16 bp, Homo sapiens
gatctggaagttctct

SEQ ID NO: 2765 - DNA, 14 bp, Homo sapiens
gatctgagtcctct

SEQ ID NO: 2766 - DNA, 17 bp, Homo sapiens
aatctgggcctcggcct

SEQ ID NO: 2767 - DNA, 18 bp, Homo sapiens
tctgggctgggccctctt

SEQ ID NO: 2768 - DNA, 19 bp, Homo sapiens
gatctgagctcttgtcact

SEQ ID NO: 2769 - DNA, 19 bp, Homo sapiens
gatctggataatccttctt

SEQ ID NO: 2770 - DNA, 19 bp, Homo sapiens
gaccttctcctgtcctctt

SEQ ID NO: 2771 - DNA, 20 bp, Homo sapiens
tctgaggttcctttcctctt

SEQ ID NO: 2772 - DNA, 24 bp, Homo sapiens
gatccgggcccctagtaccctctt

SEQ ID NO: 2773 - DNA, 19 bp, Homo sapiens
gggccccacctgtcctctt

SEQ ID NO: 2774 - DNA, 24 bp, Homo sapiens
tctgggctcctgacagttctctta

SEQ ID NO: 2775 - DNA, 21 bp, Homo sapiens
gatctgggctcactgcagcct

SEQ ID NO: 2776 - DNA, 18 bp, Homo sapiens
gagctagattgtcctctt

SEQ ID NO: 2777 - DNA, 19 bp, Homo sapiens
gatctgggcccccagtcct

SEQ ID NO: 2778 - DNA, 18 bp, Homo sapiens
gatcctgggaatcctctt

SEQ ID NO: 2779 - DNA, 18 bp, Homo sapiens
gatctgagcgtttctctt

SEQ ID NO: 2780 - DNA, 19 bp, Homo sapiens
gacttgggcccctggtcct

SEQ ID NO: 2781 - DNA, 19 bp, Homo sapiens
tgtccccccactccgtcct

SEQ ID NO: 2782 - DNA, 18 bp, Homo sapiens
tctgggcccttccagcct

SEQ ID NO: 2783 - DNA, 18 bp, Homo sapiens
ggcgccccctgtcttctt

SEQ ID NO: 2784 - DNA, 21 bp, Homo sapiens
gatctgggctcaccgcaacct

SEQ ID NO: 2785 - DNA, 21 bp, Homo sapiens
gactgggccctcctgcctctt

SEQ ID NO: 2786 - DNA, 18 bp, Homo sapiens
ggaagagttttgtcttct

SEQ ID NO: 2787 - DNA, 65 bp, Sheeppox virus
ttcacaagtattattaaaaatgagtatcgatagttacattaccatatcatccatgctcatgtgga

SEQ ID NO: 2788 - DNA, 24 bp, Sheeppox virus
cacaagtattattaaaaatgagta

SEQ ID NO: 2789 - DNA, 17 bp, Sheeppox virus
atccatgctcatgtgga

SEQ ID NO: 2790 - DNA, 22 bp, Homo sapiens
cactagttactgaaaatgagta

SEQ ID NO: 2791 - DNA, 21 bp, Homo sapiens
atccatgcccaaaacatgtgg

SEQ ID NO: 2792 - DNA, 18 bp, Homo sapiens
cccacagggctgtgtgga

SEQ ID NO: 2793 - DNA, 19 bp, Homo sapiens
atccatgcctgctggtgga

SEQ ID NO: 2794 - DNA, 20 bp, Homo sapiens
acccatgacactctgtgtgg

SEQ ID NO: 2795 - DNA, 74 bp, Sheeppox virus
gagggtctggatggtgagcttggagagagcgtcttcgtcaatgacctgctctcctgtagccttgtccagctttc

SEQ ID NO: 2796 - DNA, 24 bp, Sheeppox virus
tggatggtgagcttggagagagcg

SEQ ID NO: 2797 - DNA, 24 bp, Sheeppox virus
tctcctgtagccttgtccagcttt

SEQ ID NO: 2798 - DNA, 19 bp, Homo sapiens
tgtgtggtggacagagagc

SEQ ID NO: 2799 - DNA, 22 bp, Homo sapiens
tggaatggatttttggagagag

SEQ ID NO: 2800 - DNA, 17 bp, Homo sapiens
ggtggaggaaagagagc

SEQ ID NO: 2801 - DNA, 21 bp, Homo sapiens
tggaaggtgtgccagggagag

SEQ ID NO: 2802 - DNA, 20 bp, Homo sapiens
gggtgggagtacttggggag

SEQ ID NO: 2803 - DNA, 22 bp, Homo sapiens
tgggtggggcccacagagagcg

SEQ ID NO: 2804 - DNA, 63 bp, Sheeppox virus
gaagatcgatgtcccgccgccgctggcgcagctgcgcggcatcgcgtggtgggacgcgttttc

SEQ ID NO: 2805 - DNA, 24 bp, Sheeppox virus
catcgcgtggtgggacgcgttttc

SEQ ID NO: 2806 - DNA, 24 bp, Sheeppox virus
gatgtcccgccgccgctggcgcag

SEQ ID NO: 2807 - DNA, 18 bp, Homo sapiens
tcgccgaggtgtgttttc

SEQ ID NO: 2808 - DNA, 23 bp, Homo sapiens
tctgtggcaaagaatgtgttttc

SEQ ID NO: 2809 - DNA, 15 bp, Homo sapiens
gatgttccccggcgc

SEQ ID NO: 2810 - DNA, 17 bp, Homo sapiens
tgtcccggcgcactgca

SEQ ID NO: 2811 - DNA, 18 bp, Homo sapiens
tgccccgccggccggcgc

SEQ ID NO: 2812 - DNA, 19 bp, Homo sapiens
gcctgcccgcgcggcgcag

SEQ ID NO: 2813 - DNA, 17 bp, Homo sapiens
gtcccgtcgccgccacg

SEQ ID NO: 2814 - DNA, 21 bp, Homo sapiens
tgtcccgcgaggctggcgcag

SEQ ID NO: 2815 - DNA, 21 bp, Homo sapiens
gatgtcccccgccgcccccgg

SEQ ID NO: 2816 - DNA, 18 bp, Homo sapiens
gatgtcccccgcccagca

SEQ ID NO: 2817 - DNA, 15 bp, Homo sapiens
gtcccgccgctggcg

SEQ ID NO: 2818 - DNA, 21 bp, Homo sapiens
ccgccgccgctgctgctgcag

SEQ ID NO: 2819 - DNA, 19 bp, Homo sapiens
gtctcgcggcctggcgcag

SEQ ID NO: 2820 - DNA, 78 bp, Sheeppox virus
cgctcgtgcggcagccgcccagcgaggtgcagaccgtcaacgcgctggacctcgtcacgtgcgcgctgctgctgggcg

SEQ ID NO: 2821 - DNA, 24 bp, Sheeppox virus
gacctcgtcacgtgcgcgctgctg

SEQ ID NO: 2822 - DNA, 24 bp, Sheeppox virus
cggcagccgcccagcgaggtgcag

SEQ ID NO: 2823 - DNA, 19 bp, Homo sapiens
ccatgtcacgtgcccgctg

SEQ ID NO: 2824 - DNA, 19 bp, Homo sapiens
tcggaggcgtgcgctgctg

SEQ ID NO: 2825 - DNA, 20 bp, Homo sapiens
gacctcgtcacgtccacctg

SEQ ID NO: 2826 - DNA, 23 bp, Homo sapiens
cggcgcgccgcaggaaggtgcag

SEQ ID NO: 2827 - DNA, 18 bp, Homo sapiens
ggcagccgtccagcctgg

SEQ ID NO: 2828 - DNA, 18 bp, Homo sapiens
ggcagctactcagctaca

SEQ ID NO: 2829 - DNA, 21 bp, Homo sapiens
cggcagcccctagagcctgtg

SEQ ID NO: 2830 - DNA, 15 bp, Homo sapiens
cggcagccgctgtgc

SEQ ID NO: 2831 - DNA, 20 bp, Homo sapiens
cgtggccgcccagctcccgg

SEQ ID NO: 2832 - DNA, 21 bp, Homo sapiens
cggcagccgctgcgggctcag

SEQ ID NO: 2833 - DNA, 21 bp, Homo sapiens
ggcagccgctttagcagccag

SEQ ID NO: 2834 - DNA, 18 bp, Homo sapiens
ggcggtcgcccagcggcg

SEQ ID NO: 2835 - DNA, 23 bp, Homo sapiens
cggcagccgccccgctcctgcag

SEQ ID NO: 2836 - DNA, 20 bp, Homo sapiens
cggcagccgcacagtcctgg

SEQ ID NO: 2837 - DNA, 20 bp, Homo sapiens
ggcagctgttagcaagacag

SEQ ID NO: 2838 - DNA, 17 bp, Homo sapiens
ggcgcccgccgaggtgc

SEQ ID NO: 2839 - DNA, 21 bp, Homo sapiens
cggcagccgcctgctccccgg

SEQ ID NO: 2840 - DNA, 23 bp, Homo sapiens
ggcagtcagctgttgaggtgcag

SEQ ID NO: 2841 - DNA, 70 bp, Sheeppox virus
ttggttccggccccggttccggctccggccccgattccggctccggccccgactccggctccggccccga

SEQ ID NO: 2842 - DNA, 24 bp, Sheeppox virus
gccccggttccggctccggccccg

SEQ ID NO: 2843 - DNA, 24 bp, Sheeppox virus
ccggccccgactccggctccggcc

SEQ ID NO: 2844 - DNA, 20 bp, Homo sapiens
cctcctcggctccggcctcg

SEQ ID NO: 2845 - DNA, 24 bp, Homo sapiens
gccccggctctcgctccggctccg

SEQ ID NO: 2846 - DNA, 20 bp, Homo sapiens
caggcctggctccggccccg

SEQ ID NO: 2847 - DNA, 21 bp, Homo sapiens
cctggtcccgaggaggctccg

SEQ ID NO: 2848 - DNA, 19 bp, Homo sapiens
ggatcccgccccggcctcg

SEQ ID NO: 2849 - DNA, 21 bp, Homo sapiens
cctggttccggatccttcccc

SEQ ID NO: 2850 - DNA, 18 bp, Homo sapiens
gccgcgacgctccggccc

SEQ ID NO: 2851 - DNA, 18 bp, Homo sapiens
gctgcggctccggctccg

SEQ ID NO: 2852 - DNA, 18 bp, Homo sapiens
gccgcggccctccggccc

SEQ ID NO: 2853 - DNA, 24 bp, Homo sapiens
gccacggctccggctctgcggggc

SEQ ID NO: 2854 - DNA, 21 bp, Homo sapiens
gctccggctctggcttcctcg

SEQ ID NO: 2855 - DNA, 19 bp, Homo sapiens
ggtctggatgacggccccg

SEQ ID NO: 2856 - DNA, 24 bp, Homo sapiens
gctgcggctcgagctccggcttcg

SEQ ID NO: 2857 - DNA, 18 bp, Homo sapiens
gcctcggttcggcggggc

SEQ ID NO: 2858 - DNA, 23 bp, Homo sapiens
gcccgggttccagcacggcctcg

SEQ ID NO: 2859 - DNA, 24 bp, Homo sapiens
gctccggttccggctgcggctccg

SEQ ID NO: 2860 - DNA, 20 bp, Homo sapiens
cggctccggctccggttccg

SEQ ID NO: 2861 - DNA, 20 bp, Homo sapiens
gccccgcggctccggctccg

SEQ ID NO: 2862 - DNA, 22 bp, Homo sapiens
gccgtgtccggctctggctccg

SEQ ID NO: 2863 - DNA, 23 bp, Homo sapiens
gcccgcaaccggctccggttccg

SEQ ID NO: 2864 - DNA, 18 bp, Homo sapiens
gctccggttccgtcttcg

SEQ ID NO: 2865 - DNA, 18 bp, Homo sapiens
gccccgggttcgggcccc

SEQ ID NO: 2866 - DNA, 23 bp, Homo sapiens
gcctacgggcgccttcggccccg

SEQ ID NO: 2867 - DNA, 19 bp, Homo sapiens
gccccggtctggaggcccc

SEQ ID NO: 2868 - DNA, 18 bp, Homo sapiens
gccctgttccggctgccg

SEQ ID NO: 2869 - DNA, 21 bp, Homo sapiens
ccaggcgttcggctccggccc

SEQ ID NO: 2870 - DNA, 19 bp, Homo sapiens
gctcgggttccggggcccc

SEQ ID NO: 2871 - DNA, 21 bp, Homo sapiens
cgcgctccggctctggccccg

SEQ ID NO: 2872 - DNA, 21 bp, Homo sapiens
gccccggctccgctggctccg

SEQ ID NO: 2873 - DNA, 24 bp, Homo sapiens
gctcgggctcgggctccggccccg

SEQ ID NO: 2874 - DNA, 19 bp, Homo sapiens
gccccgctccggctccggc

SEQ ID NO: 2875 - DNA, 28 bp, Homo sapiens
actccggttccggctctccgcggggccg

SEQ ID NO: 2876 - DNA, 21 bp, Homo sapiens
gcctgtggggctccggctccg

SEQ ID NO: 2877 - DNA, 18 bp, Homo sapiens
ggctccggctccggctcc

SEQ ID NO: 2878 - DNA, 18 bp, Homo sapiens
ccgtcggtctccggcccc

SEQ ID NO: 2879 - DNA, 19 bp, Homo sapiens
gcttggggctccggctccg

SEQ ID NO: 2880 - DNA, 21 bp, Homo sapiens
cggttctaggtctcgcggggc

SEQ ID NO: 2881 - DNA, 17 bp, Homo sapiens
ggttccagtccacctcg

SEQ ID NO: 2882 - DNA, 19 bp, Homo sapiens
gccctggctccgagcttcg

SEQ ID NO: 2883 - DNA, 20 bp, Homo sapiens
gccccggttctgctcttccc

SEQ ID NO: 2884 - DNA, 21 bp, Homo sapiens
gccccgcggctcctccggccc

SEQ ID NO: 2885 - DNA, 21 bp, Homo sapiens
cccggttctggctgcgctccg

SEQ ID NO: 2886 - DNA, 22 bp, Homo sapiens
ccgggcccggctcaggcccggc

SEQ ID NO: 2887 - DNA, 18 bp, Homo sapiens
cggctccgatctgtccgc

SEQ ID NO: 2888 - DNA, 21 bp, Homo sapiens
ccgggcccaagatggctccgg

SEQ ID NO: 2889 - DNA, 15 bp, Homo sapiens
ccggcccggctccgg

SEQ ID NO: 2890 - DNA, 21 bp, Homo sapiens
ccgcccccgcgggctccggcc

SEQ ID NO: 2891 - DNA, 21 bp, Homo sapiens
ccggcccctggctagccggcc

SEQ ID NO: 2892 - DNA, 22 bp, Homo sapiens
ccagtcccggctccgctaggcc

SEQ ID NO: 2893 - DNA, 20 bp, Homo sapiens
ggccccggcctctgggcgtc

SEQ ID NO: 2894 - DNA, 17 bp, Homo sapiens
cggccacggctccaggc

SEQ ID NO: 2895 - DNA, 23 bp, Homo sapiens
ccggctctcgctccggctccggc

SEQ ID NO: 2896 - DNA, 21 bp, Homo sapiens
ccggctccgcttcgcctggcc

SEQ ID NO: 2897 - DNA, 22 bp, Homo sapiens
ccggccccattgctacttggcc

SEQ ID NO: 2898 - DNA, 19 bp, Homo sapiens
ccggcccctgggcttcggc

SEQ ID NO: 2899 - DNA, 29 bp, Homo sapiens
ccggccccgcctctgaggtcggccggagc

SEQ ID NO: 2900 - DNA, 19 bp, Homo sapiens
cggctgtctcggctccggc

SEQ ID NO: 2901 - DNA, 22 bp, Homo sapiens
ccggccccggtgcccaccggcc

SEQ ID NO: 2902 - DNA, 19 bp, Homo sapiens
cggctccgggtccattggc

SEQ ID NO: 2903 - DNA, 18 bp, Homo sapiens
ccggtcccagctccggct

SEQ ID NO: 2904 - DNA, 17 bp, Homo sapiens
ggcccggctctgcagcc

SEQ ID NO: 2905 - DNA, 18 bp, Homo sapiens
ccagctccggctccgcgc

SEQ ID NO: 2906 - DNA, 16 bp, Homo sapiens
gccccggctgctcggc

SEQ ID NO: 2907 - DNA, 19 bp, Homo sapiens
ccagccctgactccaggct

SEQ ID NO: 2908 - DNA, 19 bp, Homo sapiens
ccggctcccgctctggatc

SEQ ID NO: 2909 - DNA, 15 bp, Homo sapiens
ggcttccggctccgg

SEQ ID NO: 2910 - DNA, 22 bp, Homo sapiens
cccgcccgggccggctccggcc

SEQ ID NO: 2911 - DNA, 22 bp, Homo sapiens
ccggctcctgcttggcccggcc

SEQ ID NO: 2912 - DNA, 23 bp, Homo sapiens
cggccccgagcttggtcaccggc

SEQ ID NO: 2913 - DNA, 19 bp, Homo sapiens
ccgcgtccccggctccggc

SEQ ID NO: 2914 - DNA, 23 bp, Homo sapiens
ccgaccccggctcggctccggcc

SEQ ID NO: 2915 - DNA, 22 bp, Homo sapiens
ccggctccgctccggcagcggc

SEQ ID NO: 2916 - DNA, 23 bp, Homo sapiens
ccggctcccgacaccgtccggcc

SEQ ID NO: 2917 - DNA, 21 bp, Homo sapiens
cgggcccgcccggctccggcc

SEQ ID NO: 2918 - DNA, 21 bp, Homo sapiens
ccggctccggctactgcggcc

SEQ ID NO: 2919 - DNA, 21 bp, Homo sapiens
ggctgcggctccggctccggc

SEQ ID NO: 2920 - DNA, 21 bp, Homo sapiens
ccggccccggccgacgcggcc

SEQ ID NO: 2921 - DNA, 27 bp, Homo sapiens
ccggcaggccacggctccggctctggc

SEQ ID NO: 2922 - DNA, 16 bp, Homo sapiens
cggctccggctctggc

SEQ ID NO: 2923 - DNA, 18 bp, Homo sapiens
ccggccccggcccgcggc

SEQ ID NO: 2924 - DNA, 16 bp, Homo sapiens
ggccccggccccgagc

SEQ ID NO: 2925 - DNA, 18 bp, Homo sapiens
gccccggcccgtccggcc

SEQ ID NO: 2926 - DNA, 18 bp, Homo sapiens
ccgggcccggctccgagc

SEQ ID NO: 2927 - DNA, 24 bp, Homo sapiens
ccggccccggccctggccctggcc

SEQ ID NO: 2928 - DNA, 20 bp, Homo sapiens
ccagccccggctttctctgg

SEQ ID NO: 2929 - DNA, 24 bp, Homo sapiens
ccggctctgcgctcgggcccggcc

SEQ ID NO: 2930 - DNA, 20 bp, Homo sapiens
ccggctccggctcagtggcc

SEQ ID NO: 2931 - DNA, 18 bp, Homo sapiens
gctcaggccggctccggc

SEQ ID NO: 2932 - DNA, 25 bp, Homo sapiens
ccggccccactcccggttggccggg

SEQ ID NO: 2933 - DNA, 21 bp, Homo sapiens
ccgcgctccggctgcccggcc

SEQ ID NO: 2934 - DNA, 20 bp, Homo sapiens
gctccggctccaggtccggc

SEQ ID NO: 2935 - DNA, 15 bp, Homo sapiens
ccggcccctccggct

SEQ ID NO: 2936 - DNA, 19 bp, Homo sapiens
ccggctcgggctccggggc

SEQ ID NO: 2937 - DNA, 22 bp, Homo sapiens
ccgcgccccggcggcttcggcc

SEQ ID NO: 2938 - DNA, 23 bp, Homo sapiens
ccggctgcggctccggctctggc

SEQ ID NO: 2939 - DNA, 21 bp, Homo sapiens
gccccgcggctccggctccgg

SEQ ID NO: 2940 - DNA, 24 bp, Homo sapiens
cctgccccgcggctccggctccgg

SEQ ID NO: 2941 - DNA, 23 bp, Homo sapiens
ccggctccggttccggctgcggc

SEQ ID NO: 2942 - DNA, 23 bp, Homo sapiens
ccggctctggctctggctgcggc

SEQ ID NO: 2943 - DNA, 19 bp, Homo sapiens
cccgccccggctcctcggc

SEQ ID NO: 2944 - DNA, 20 bp, Homo sapiens
cggccccggctcccgcggcc

SEQ ID NO: 2945 - DNA, 18 bp, Homo sapiens
gcccgcaaccggctccgg

SEQ ID NO: 2946 - DNA, 21 bp, Homo sapiens
ccggctccggttccgtcttcg

SEQ ID NO: 2947 - DNA, 18 bp, Homo sapiens
ccggccccgggttcgggc

SEQ ID NO: 2948 - DNA, 25 bp, Homo sapiens
ccggctctgtctagtggctccggcc

SEQ ID NO: 2949 - DNA, 28 bp, Homo sapiens
ccggccctggctcgcggaatgggcggcc

SEQ ID NO: 2950 - DNA, 19 bp, Homo sapiens
ccaggcgttcggctccggc

SEQ ID NO: 2951 - DNA, 18 bp, Homo sapiens
ggccccggctccgctggc

SEQ ID NO: 2952 - DNA, 21 bp, Homo sapiens
ccggctctggccccggctccg

SEQ ID NO: 2953 - DNA, 22 bp, Homo sapiens
ccggcttagactccgatggggc

SEQ ID NO: 2954 - DNA, 24 bp, Homo sapiens
ccaggctctgctccggctccggcc

SEQ ID NO: 2955 - DNA, 23 bp, Homo sapiens
cggctcgggctcgggctccggcc

SEQ ID NO: 2956 - DNA, 21 bp, Homo sapiens
ccggccccggctcccctcggc

SEQ ID NO: 2957 - DNA, 21 bp, Homo sapiens
ccggccctcgctgccccggcc

SEQ ID NO: 2958 - DNA, 23 bp, Homo sapiens
ggcaccggctccggagaagcggc

SEQ ID NO: 2959 - DNA, 21 bp, Homo sapiens
ggctttgggctccagcttggc

SEQ ID NO: 2960 - DNA, 20 bp, Homo sapiens
ggccccgagctccgcagggc

SEQ ID NO: 2961 - DNA, 20 bp, Homo sapiens
ccggctccgctccgcgcggc

SEQ ID NO: 2962 - DNA, 17 bp, Homo sapiens
ccggctcgtggctctgg

SEQ ID NO: 2963 - DNA, 22 bp, Homo sapiens
ccggccccacggccctccggcc

SEQ ID NO: 2964 - DNA, 21 bp, Homo sapiens
cggccccgctccggctccggc

SEQ ID NO: 2965 - DNA, 22 bp, Homo sapiens
ccggctccggctttgctcggcc

SEQ ID NO: 2966 - DNA, 17 bp, Homo sapiens
cccgctccggctccggc

SEQ ID NO: 2967 - DNA, 25 bp, Homo sapiens
ccgccgctgcgactccggttccggc

SEQ ID NO: 2968 - DNA, 20 bp, Homo sapiens
ccggttccggctctccggcc

SEQ ID NO: 2969 - DNA, 21 bp, Homo sapiens
ccggcgccggctggcccggcc

SEQ ID NO: 2970 - DNA, 19 bp, Homo sapiens
ccggcccgcggctccgagc

SEQ ID NO: 2971 - DNA, 22 bp, Homo sapiens
ccgcctcggctccagctccggc

SEQ ID NO: 2972 - DNA, 19 bp, Homo sapiens
ccggctccggctccgggcc

SEQ ID NO: 2973 - DNA, 17 bp, Homo sapiens
ccggtctcagctccggc

SEQ ID NO: 2974 - DNA, 21 bp, Homo sapiens
ccggcttcgggtctccaaggc

SEQ ID NO: 2975 - DNA, 22 bp, Homo sapiens
ccgccccggctcccccctggcc

SEQ ID NO: 2976 - DNA, 20 bp, Homo sapiens
ccggccccgcctctgggacg

SEQ ID NO: 2977 - DNA, 18 bp, Homo sapiens
cggctccgggtcgccggc

SEQ ID NO: 2978 - DNA, 19 bp, Homo sapiens
ggcccgcgactccggtggc

SEQ ID NO: 2979 - DNA, 17 bp, Homo sapiens
ggccctgcccctccggc

SEQ ID NO: 2980 - DNA, 18 bp, Homo sapiens
ccggccccatccctctgg

SEQ ID NO: 2981 - DNA, 19 bp, Homo sapiens
ccgtcccggctcccgcggc

SEQ ID NO: 2982 - DNA, 16 bp, Homo sapiens
cggccccgcgctccgg

SEQ ID NO: 2983 - DNA, 25 bp, Homo sapiens
ccgcctccgggggcgggctccggcc

SEQ ID NO: 2984 - DNA, 22 bp, Homo sapiens
ccggctgcggctcctcccggcc

SEQ ID NO: 2985 - DNA, 24 bp, Homo sapiens
ccgcctcggctccgagcggtggcc

SEQ ID NO: 2986 - DNA, 26 bp, Homo sapiens
ccggcctcggcgcgctcggctccggc

SEQ ID NO: 2987 - DNA, 17 bp, Homo sapiens
ggcccagtggctccggc

SEQ ID NO: 2988 - DNA, 19 bp, Homo sapiens
gccactgctggctccggcc

SEQ ID NO: 2989 - DNA, 108 bp, Sheeppox virus
gtactatcccctgaggggatggtgttttcggaagacgccatgagaaagctctacaaggggaccatcgacatgtttgtctccgacccatcttccctcctgaacgtagac

SEQ ID NO: 2990 - DNA, 24 bp, Sheeppox virus
acgccatgagaaagctctacaagg

SEQ ID NO: 2991 - DNA, 24 bp, Sheeppox virus
tttgtctccgacccatcttccctc

SEQ ID NO: 2992 - DNA, 19 bp, Homo sapiens
gctgtgaagctctacgagg

SEQ ID NO: 2993 - DNA, 24 bp, Homo sapiens
gccatgaggaagctgactgtgagg

SEQ ID NO: 2994 - DNA, 18 bp, Homo sapiens
acgtcatgaaaaggtcta

SEQ ID NO: 2995 - DNA, 20 bp, Homo sapiens
gccatgagagagggcccagg

SEQ ID NO: 2996 - DNA, 22 bp, Homo sapiens
acccatgagagagctgcacagg

SEQ ID NO: 2997 - DNA, 26 bp, Homo sapiens
acgccatgagagaaatctctacaggg

SEQ ID NO: 2998 - DNA, 21 bp, Homo sapiens
acgccacgggaaatgccaagg

SEQ ID NO: 2999 - DNA, 19 bp, Homo sapiens
cgccatgagcggctgcagg

SEQ ID NO: 3000 - DNA, 19 bp, Homo sapiens
gctttgagaaagaggaagg

SEQ ID NO: 3001 - DNA, 19 bp, Homo sapiens
gccatgagagactcggagg

SEQ ID NO: 3002 - DNA, 15 bp, Homo sapiens
gccaaagctctgcag

SEQ ID NO: 3003 - DNA, 18 bp, Homo sapiens
acgcgtgttctctacaag

SEQ ID NO: 3004 - DNA, 25 bp, Homo sapiens
gccatgaggaggtaagccagtaagg

SEQ ID NO: 3005 - DNA, 76 bp, Sheeppox virus
cgggcgctggaggcgagcgcgcagcgggcgacggcagccatcgaggccgtgctcgcgttcaacccgcacgcgcccg

SEQ ID NO: 3006 - DNA, 24 bp, Sheeppox virus
catcgaggccgtgctcgcgttcaa

SEQ ID NO: 3007 - DNA, 24 bp, Sheeppox virus
cgctggaggcgagcgcgcagcggg

SEQ ID NO: 3008 - DNA, 16 bp, Homo sapiens
cgaggtcaggcgttca

SEQ ID NO: 3009 - DNA, 14 bp, Homo sapiens
gaggcccgcgttca

SEQ ID NO: 3010 - DNA, 20 bp, Homo sapiens
cgcggaggcgggagcgcggg

SEQ ID NO: 3011 - DNA, 19 bp, Homo sapiens
cgctggagccgggaagcgg

SEQ ID NO: 3012 - DNA, 15 bp, Homo sapiens
cgctggaggcagccg

SEQ ID NO: 3013 - DNA, 24 bp, Homo sapiens
cgctggaggggggcggtggctggg

SEQ ID NO: 3014 - DNA, 20 bp, Homo sapiens
gctgccgggcgtgcggcggg

SEQ ID NO: 3015 - DNA, 24 bp, Homo sapiens
cgctggggcgaggggcgcagcggg

SEQ ID NO: 3016 - DNA, 21 bp, Homo sapiens
tggaggcgggctggaggcggg

SEQ ID NO: 3017 - DNA, 18 bp, Homo sapiens
cgctggcggctgcagcgg

SEQ ID NO: 3018 - DNA, 16 bp, Homo sapiens
cgctggagcggcggcg

SEQ ID NO: 3019 - DNA, 22 bp, Homo sapiens
cgctggagggaacggtggtggg

SEQ ID NO: 3020 - DNA, 18 bp, Homo sapiens
gctgaaggggcgcggcgg

SEQ ID NO: 3021 - DNA, 14 bp, Homo sapiens
gctggagggaggcg

SEQ ID NO: 3022 - DNA, 17 bp, Homo sapiens
cgctggggcgagcgagg

SEQ ID NO: 3023 - DNA, 21 bp, Homo sapiens
cgctggagcgggcgttctggg

SEQ ID NO: 3024 - DNA, 18 bp, Homo sapiens
cgcgagggcgcgcagcgg

SEQ ID NO: 3025 - DNA, 18 bp, Homo sapiens
gctggagggagtggctgg

SEQ ID NO: 3026 - DNA, 23 bp, Homo sapiens
cgctagaggcgggcgcccagagg

SEQ ID NO: 3027 - DNA, 22 bp, Homo sapiens
cgctggaggccgggggtgcggg

SEQ ID NO: 3028 - DNA, 17 bp, Homo sapiens
gctggaggcgccggcgg

SEQ ID NO: 3029 - DNA, 19 bp, Homo sapiens
cgcgggggccgggcagcgg

SEQ ID NO: 3030 - DNA, 15 bp, Homo sapiens
tggaggcgagcccgg

SEQ ID NO: 3031 - DNA, 24 bp, Homo sapiens
cgcgggaggcgagaggaaggtggg

SEQ ID NO: 3032 - DNA, 18 bp, Homo sapiens
gctggagggctgcagtgg

SEQ ID NO: 3033 - DNA, 117 bp, Human herpesvirus 5
cgcccgctccggcgccggcgagggggtggtgtcgcgcggcccgggccggttcggccgactcggctggcgcgggcggccgtgccgcgtcccaccgcgccgtcgcgcgctctgcggccg

SEQ ID NO: 3034 - DNA, 24 bp, Human herpesvirus 5
ctggcgcgggcggccgtgccgcgt

SEQ ID NO: 3035 - DNA, 24 bp, Human herpesvirus 5
tccggcgccggcgagggggtggtg

SEQ ID NO: 3036 - DNA, 18 bp, Homo sapiens
tggcctgggcggcccacg

SEQ ID NO: 3037 - DNA, 19 bp, Homo sapiens
ctgccgcgggcggccgcgc

SEQ ID NO: 3038 - DNA, 26 bp, Homo sapiens
ctggcgcgggcggctggaacgcggcc

SEQ ID NO: 3039 - DNA, 18 bp, Homo sapiens
ccggcgcgggcggcgcgt

SEQ ID NO: 3040 - DNA, 18 bp, Homo sapiens
tggtgcgggcggcgcggc

SEQ ID NO: 3041 - DNA, 18 bp, Homo sapiens
ccggcgctggcgggggcg

SEQ ID NO: 3042 - DNA, 16 bp, Homo sapiens
cggcgccggcggcggc

SEQ ID NO: 3043 - DNA, 22 bp, Homo sapiens
gctggggcttgagggggtggtg

SEQ ID NO: 3044 - DNA, 21 bp, Homo sapiens
ccggtggcatggggggtggtg

SEQ ID NO: 3045 - DNA, 18 bp, Homo sapiens
tccggcggcggcgggggg

SEQ ID NO: 3046 - DNA, 68 bp, Human herpesvirus 5
gtgccgcgccgcctggagtcgcggttcggccggaccgtgcacgcgctctcgcggcccttcaacggcac

SEQ ID NO: 3047 - DNA, 22 bp, Human herpesvirus 5
tctcgcggcccttcaacggcac

SEQ ID NO: 3048 - DNA, 24 bp, Human herpesvirus 5
cctggagtcgcggttcggccggac

SEQ ID NO: 3049 - DNA, 16 bp, Homo sapiens
ctcgcggctccgcggc

SEQ ID NO: 3050 - DNA, 19 bp, Homo sapiens
ctcgcggcccgggcgcggc

SEQ ID NO: 3051 - DNA, 16 bp, Homo sapiens
tctcccggccctcgca

SEQ ID NO: 3052 - DNA, 23 bp, Homo sapiens
tcgcggcccgtctgggatggcac

SEQ ID NO: 3053 - DNA, 17 bp, Homo sapiens
tcgcgaccctgcagtac

SEQ ID NO: 3054 - DNA, 17 bp, Homo sapiens
cctcgcggctcttctgc

SEQ ID NO: 3055 - DNA, 16 bp, Homo sapiens
tctcctggctcaacag

SEQ ID NO: 3056 - DNA, 17 bp, Homo sapiens
tcgtggcccttcctgac

SEQ ID NO: 3057 - DNA, 19 bp, Homo sapiens
cctcgcggtcctcaacgca

SEQ ID NO: 3058 - DNA, 17 bp, Homo sapiens
tctcgcggccctgcagc

SEQ ID NO: 3059 - DNA, 14 bp, Homo sapiens
ctcgcggccctagc

SEQ ID NO: 3060 - DNA, 18 bp, Homo sapiens
tctcgcagccttccagca

SEQ ID NO: 3061 - DNA, 19 bp, Homo sapiens
tctttctgcctttcaacgg

SEQ ID NO: 3062 - DNA, 22 bp, Homo sapiens
tccaacccttctttggtggcac

SEQ ID NO: 3063 - DNA, 17 bp, Homo sapiens
cctggagtcggggtggg

SEQ ID NO: 3064 - DNA, 22 bp, Homo sapiens
cctggagtcagcggttgttggc

SEQ ID NO: 3065 - DNA, 20 bp, Homo sapiens
cctggagttggccctgctgg

SEQ ID NO: 3066 - DNA, 17 bp, Homo sapiens
ctggagcctggctggac

SEQ ID NO: 3067 - DNA, 22 bp, Homo sapiens
cctgggtctccagcggccggac

SEQ ID NO: 3068 - DNA, 19 bp, Homo sapiens
cctggagtgtgcagattgg

SEQ ID NO: 3069 - DNA, 18 bp, Homo sapiens
cctggagcgccgccgggc

SEQ ID NO: 3070 - DNA, 21 bp, Homo sapiens
cctggggtagatccaggctgg

SEQ ID NO: 3071 - DNA, 20 bp, Homo sapiens
ccaggagtcgcggcttccgg

SEQ ID NO: 3072 - DNA, 25 bp, Homo sapiens
ccaggagtcgcaagatttggctgga

SEQ ID NO: 3073 - DNA, 17 bp, Homo sapiens
cctgggtcgggctgggc

SEQ ID NO: 3074 - DNA, 16 bp, Homo sapiens
cctggagccggttggg

SEQ ID NO: 3075 - DNA, 19 bp, Homo sapiens
ctggagttggaggctgggc

SEQ ID NO: 3076 - DNA, 92 bp, Human herpesvirus 5
tcgcccttccggagtgacgcacatagctcgccggggcccgccttctgtccaggccggttccaaagcggcgtgtctgagtcacccggaggcga

SEQ ID NO: 3077 - DNA, 24 bp, Human herpesvirus 5
ttccaaagcggcgtgtctgagtca

SEQ ID NO: 3078 - DNA, 24 bp, Human herpesvirus 5
acgcacatagctcgccggggcccg

SEQ ID NO: 3079 - DNA, 22 bp, Homo sapiens
ttccatggtgtggcctgagtca

SEQ ID NO: 3080 - DNA, 22 bp, Homo sapiens
ttccaaagtggagtgtgaaaat

SEQ ID NO: 3081 - DNA, 19 bp, Homo sapiens
ttccggaatggtgtgtcca

SEQ ID NO: 3082 - DNA, 16 bp, Homo sapiens
ttccaaagcgctgggt

SEQ ID NO: 3083 - DNA, 18 bp, Homo sapiens
gcggggcgccggggcccg

SEQ ID NO: 3084 - DNA, 20 bp, Homo sapiens
gcacatgggtctggggcccg

SEQ ID NO: 3085 - DNA, 21 bp, Homo sapiens
cgggcatagctcgctgcctcg

SEQ ID NO: 3086 - DNA, 16 bp, Homo sapiens
cgcggcggccggggcc

SEQ ID NO: 3087 - DNA, 19 bp, Homo sapiens
cacatagcttggtggctcg

SEQ ID NO: 3088 - DNA, 15 bp, Homo sapiens
gctcacagctggggc

SEQ ID NO: 3089 - DNA, 18 bp, Homo sapiens
acacacatacctggggcc

SEQ ID NO: 3090 - DNA, 16 bp, Homo sapiens
gcatagctcgaggtgc

SEQ ID NO: 3091 - DNA, 14 bp, Homo sapiens
cacataccggggcc

SEQ ID NO: 3092 - DNA, 24 bp, Homo sapiens
gcgggcggcaatcgccggggtccg

SEQ ID NO: 3093 - DNA, 19 bp, Homo sapiens
gcatagctcgttaaaaccc

SEQ ID NO: 3094 - DNA, 21 bp, Homo sapiens
cgcgcaggcggcaggggcccg

SEQ ID NO: 3095 - DNA, 23 bp, Homo sapiens
cgcgcgggcggcgtcggggcccg

SEQ ID NO: 3096 - DNA, 20 bp, Homo sapiens
gcatatagctcagggaaccc

SEQ ID NO: 3097 - DNA, 22 bp, Homo sapiens
cgcgtggggctcgccattagcc

SEQ ID NO: 3098 - DNA, 18 bp, Homo sapiens
cgcgcgcgtcggggcccg

SEQ ID NO: 3099 - DNA, 18 bp, Homo sapiens
cgcactggctcgccggcc

SEQ ID NO: 3100 - DNA, 104 bp, Human herpesvirus 5
gcagccgcaggatcgacacgaggaacggggtcagcacgcggtcgatggtgtagttggagtaggcgatgttgtcctccgcgccctggttggtcacctggcggcgc

SEQ ID NO: 3101 - DNA, 24 bp, Human herpesvirus 5
tggagtaggcgatgttgtcctccg

SEQ ID NO: 3102 - DNA, 24 bp, Human herpesvirus 5
gtcagcacgcggtcgatggtgtag

SEQ ID NO: 3103 - DNA, 19 bp, Homo sapiens
tggagcaggtggtgtcacc

SEQ ID NO: 3104 - DNA, 21 bp, Homo sapiens
ggagtgggtgaagaccctccg

SEQ ID NO: 3105 - DNA, 21 bp, Homo sapiens
tggagtaggtcaaagtctccg

SEQ ID NO: 3106 - DNA, 19 bp, Homo sapiens
gtcagggcagggtggtgta

SEQ ID NO: 3107 - DNA, 16 bp, Homo sapiens
gcagtggtgatggtgt

SEQ ID NO: 3108 - DNA, 70 bp, Human herpesvirus 5
tgcgtctgcaacggcatcatgttcctacacgccttgcacctgggtggaacgagcgccgtcctgcagaccg

SEQ ID NO: 3109 - DNA, 24 bp, Human herpesvirus 5
catcatgttcctacacgccttgca

SEQ ID NO: 3110 - DNA, 24 bp, Human herpesvirus 5
tggaacgagcgccgtcctgcagac

SEQ ID NO: 3111 - DNA, 20 bp, Homo sapiens
cattatgtatgtgccttgca

SEQ ID NO: 3112 - DNA, 18 bp, Homo sapiens
catcatgtcctgctctgc

SEQ ID NO: 3113 - DNA, 25 bp, Homo sapiens
catcatgtttttaaattagcttgca

SEQ ID NO: 3114 - DNA, 17 bp, Homo sapiens
atcatgttcctacaccc

SEQ ID NO: 3115 - DNA, 18 bp, Homo sapiens
catcatgtcccgttttgc

SEQ ID NO: 3116 - DNA, 19 bp, Homo sapiens
tcatgttcctgttattgca

SEQ ID NO: 3117 - DNA, 21 bp, Homo sapiens
catcatgttcttacatgaggc

SEQ ID NO: 3118 - DNA, 22 bp, Homo sapiens
catcatgtttttacatggggca

SEQ ID NO: 3119 - DNA, 18 bp, Homo sapiens
tggcacgaggtcctgcag

SEQ ID NO: 3120 - DNA, 22 bp, Homo sapiens
ggatgggcaaatgcctgcagac

SEQ ID NO: 3121 - DNA, 18 bp, Homo sapiens
tggaacgagaggtattgc

SEQ ID NO: 3122 - DNA, 18 bp, Homo sapiens
tgggtgagggtcctgcag

SEQ ID NO: 3123 - DNA, 22 bp, Homo sapiens
tggaagctatggttctgcagac

SEQ ID NO: 3124 - DNA, 18 bp, Homo sapiens
tgggacggccgtccccag

SEQ ID NO: 3125 - DNA, 20 bp, Homo sapiens
gggacgagcgccgctcagac

SEQ ID NO: 3126 - DNA, 18 bp, Homo sapiens
tgggggcaggcgtcctgc

SEQ ID NO: 3127 - DNA, 20 bp, Homo sapiens
tgggaagggcctccctgcag

SEQ ID NO: 3128 - DNA, 22 bp, Homo sapiens
tggatgggtgctcatggcagac

SEQ ID NO: 3129 - DNA, 17 bp, Homo sapiens
tgggcatgatcctgcag

SEQ ID NO: 3130 - DNA, 60 bp, Human herpesvirus 5
tctgcgactgcacctgctcctccaggcatttgatcatctgcttgcggaacaggtcgcgga

SEQ ID NO: 3131 - DNA, 20 bp, Human herpesvirus 5
cttgcggaacaggtcgcgga

SEQ ID NO: 3132 - DNA, 24 bp, Human herpesvirus 5
acctgctcctccaggcatttgatc

SEQ ID NO: 3133 - DNA, 18 bp, Homo sapiens
cttcgggacaaaccaggg

SEQ ID NO: 3134 - DNA, 17 bp, Homo sapiens
ttggggacagatcatgg

SEQ ID NO: 3135 - DNA, 20 bp, Homo sapiens
ctggcggaacatgaacgcgg

SEQ ID NO: 3136 - DNA, 18 bp, Homo sapiens
cttgtgggctggccacag

SEQ ID NO: 3137 - DNA, 15 bp, Homo sapiens
cctgcggagctcggg

SEQ ID NO: 3138 - DNA, 16 bp, Homo sapiens
cttgcagaacacacag

SEQ ID NO: 3139 - DNA, 16 bp, Homo sapiens
cctgcggaacccgcgg

SEQ ID NO: 3140 - DNA, 19 bp, Homo sapiens
cttgcgctcgggtcgcgga

SEQ ID NO: 3141 - DNA, 19 bp, Homo sapiens
cctgcggagtgtgcttgga

SEQ ID NO: 3142 - DNA, 17 bp, Homo sapiens
ttgggggacaccacgga

SEQ ID NO: 3143 - DNA, 16 bp, Homo sapiens
cttgctggagccacgg

SEQ ID NO: 3144 - DNA, 16 bp, Homo sapiens
cttgggaacagagtgg

SEQ ID NO: 3145 - DNA, 19 bp, Homo sapiens
ctggcggtcggggtcgcgg

SEQ ID NO: 3146 - DNA, 18 bp, Homo sapiens
cctgcggaacgggctgga

SEQ ID NO: 3147 - DNA, 15 bp, Homo sapiens
cttgcgaggccgcgg

SEQ ID NO: 3148 - DNA, 16 bp, Homo sapiens
ctcgcggaatgggcgg

SEQ ID NO: 3149 - DNA, 15 bp, Homo sapiens
ctcgcggggcagcgg

SEQ ID NO: 3150 - DNA, 17 bp, Homo sapiens
cctgcggaagtggtgga

SEQ ID NO: 3151 - DNA, 15 bp, Homo sapiens
cttgcagaactctgg

SEQ ID NO: 3152 - DNA, 17 bp, Homo sapiens
cttgtgaacaggttcgg

SEQ ID NO: 3153 - DNA, 14 bp, Homo sapiens
cttgcggagtcagg

SEQ ID NO: 3154 - DNA, 16 bp, Homo sapiens
cctgcggatcacgtgg

SEQ ID NO: 3155 - DNA, 19 bp, Homo sapiens
cttacggaacttaactgga

SEQ ID NO: 3156 - DNA, 19 bp, Homo sapiens
ttgctggagtggccacaga

SEQ ID NO: 3157 - DNA, 20 bp, Homo sapiens
cttgcagaaaagaccgtgga

SEQ ID NO: 3158 - DNA, 16 bp, Homo sapiens
cctgcggaggccgcgg

SEQ ID NO: 3159 - DNA, 14 bp, Homo sapiens
ctgcggggtcgcgg

SEQ ID NO: 3160 - DNA, 17 bp, Homo sapiens
cttgcggggcatggcag

SEQ ID NO: 3161 - DNA, 15 bp, Homo sapiens
cctgactggcatttg

SEQ ID NO: 3162 - DNA, 22 bp, Homo sapiens
acctgccttccaggcactgatc

SEQ ID NO: 3163 - DNA, 21 bp, Homo sapiens
ctgctcctccaggtctgtgat

SEQ ID NO: 3164 - DNA, 18 bp, Homo sapiens
cctgctcctttgggttga

SEQ ID NO: 3165 - DNA, 19 bp, Homo sapiens
tgttcctccagtcctgatc

SEQ ID NO: 3166 - DNA, 17 bp, Homo sapiens
ctggtaccaggcatttg

SEQ ID NO: 3167 - DNA, 18 bp, Homo sapiens
cttttcctccagaaagat

SEQ ID NO: 3168 - DNA, 18 bp, Homo sapiens
ctgctccaccagggcatc

SEQ ID NO: 3169 - DNA, 17 bp, Homo sapiens
ctgctcctctggtcctc

SEQ ID NO: 3170 - DNA, 21 bp, Homo sapiens
cctctttctccaggcgccctg

SEQ ID NO: 3171 - DNA, 16 bp, Homo sapiens
cttctcctccaggtga

SEQ ID NO: 3172 - DNA, 18 bp, Homo sapiens
tgcccctccaggagcatt

SEQ ID NO: 3173 - DNA, 19 bp, Homo sapiens
ctgctccttggtgtggatc

SEQ ID NO: 3174 - DNA, 76 bp, Human herpesvirus 5
gatccgggaccgccgtagcggggtgttttttaatttattttatatatacgctatgtatctactgtttttccgggtc

SEQ ID NO: 3175 - DNA, 24 bp, Human herpesvirus 5
cgccgtagcggggtgttttttaat

SEQ ID NO: 3176 - DNA, 24 bp, Human herpesvirus 5
tacgctatgtatctactgtttttc

SEQ ID NO: 3177 - DNA, 19 bp, Homo sapiens
gctgtactggctattcttt

SEQ ID NO: 3178 - DNA, 18 bp, Homo sapiens
gcctggctaattttttaa

SEQ ID NO: 3179 - DNA, 21 bp, Homo sapiens
gcatagtatttattgtttttc

SEQ ID NO: 3180 - DNA, 19 bp, Homo sapiens
tatgtatctaaacattttt

SEQ ID NO: 3181 - DNA, 19 bp, Homo sapiens
tactttatgtatctattgt

SEQ ID NO: 3182 - DNA, 19 bp, Homo sapiens
gctatgtatttacattttc

SEQ ID NO: 3183 - DNA, 63 bp, Human herpesvirus 5
gcgcctggacgttgcacgcggcgggtaccgaaagcggcgctaacgcggcaacggccacggcgc

SEQ ID NO: 3184 - DNA, 24 bp, Human herpesvirus 5
cgttgcacgcggcgggtaccgaaa

SEQ ID NO: 3185 - DNA, 21 bp, Human herpesvirus 5
acgcggcaacggccacggcgc

SEQ ID NO: 3186 - DNA, 21 bp, Homo sapiens
cgtgcgtgcggcgggcagcaa

SEQ ID NO: 3187 - DNA, 20 bp, Homo sapiens
gttgtgtggtgggtaccgaa

SEQ ID NO: 3188 - DNA, 22 bp, Homo sapiens
acgcggcactgctcgttggcgc

SEQ ID NO: 3189 - DNA, 20 bp, Homo sapiens
gcggcagcggccacgatcgc

SEQ ID NO: 3190 - DNA, 19 bp, Homo sapiens
cgggcaacggcccctacgc

SEQ ID NO: 3191 - DNA, 17 bp, Homo sapiens
gcggaacgccacggcgc

SEQ ID NO: 3192 - DNA, 18 bp, Homo sapiens
acgcggcgcggccagaac

SEQ ID NO: 3193 - DNA, 19 bp, Homo sapiens
cgccgccaggccacggtgc

SEQ ID NO: 3194 - DNA, 19 bp, Homo sapiens
acgcggcagggctgagggc

SEQ ID NO: 3195 - DNA, 16 bp, Homo sapiens
cgcagtggccacggcg

SEQ ID NO: 3196 - DNA, 16 bp, Homo sapiens
acgcggcagggtccgc

SEQ ID NO: 3197 - DNA, 16 bp, Homo sapiens
gcgcatggccacggcg

SEQ ID NO: 3198 - DNA, 18 bp, Homo sapiens
cggcggcggcggcggcgc

SEQ ID NO: 3199 - DNA, 24 bp, Homo sapiens
acgcagcaacagtgagcatggtgc

SEQ ID NO: 3200 - DNA, 19 bp, Homo sapiens
cgggacgcggccacggcgc

SEQ ID NO: 3201 - DNA, 20 bp, Homo sapiens
accggcgggtcccacggcgc

SEQ ID NO: 3202 - DNA, 16 bp, Homo sapiens
gcggcacgccacggcg

SEQ ID NO: 3203 - DNA, 17 bp, Homo sapiens
gcggcggcggacggtgc

SEQ ID NO: 3204 - DNA, 19 bp, Homo sapiens
gcggcaacggcctcctcgc

SEQ ID NO: 3205 - DNA, 18 bp, Homo sapiens
cgcggcaactgctggagc

SEQ ID NO: 3206 - DNA, 18 bp, Homo sapiens
ggggactggccacggcgc

SEQ ID NO: 3207 - DNA, 18 bp, Homo sapiens
acgtggcagaggccacag

SEQ ID NO: 3208 - DNA, 15 bp, Homo sapiens
gcggcgctcacggcg

SEQ ID NO: 3209 - DNA, 19 bp, Homo sapiens
acacggcagcggcggccgc

SEQ ID NO: 3210 - DNA, 15 bp, Homo sapiens
gctgggaccacggcg

SEQ ID NO: 3211 - DNA, 18 bp, Homo sapiens
acgcagcaacggcaccag

SEQ ID NO: 3212 - DNA, 18 bp, Homo sapiens
acctgcaggtcacggcgc

SEQ ID NO: 3213 - DNA, 88 bp, Human herpesvirus 5
gcctgcgtcgcctatgcttcgcgcgtcaccacgacaccttccttgaagtggtagacgtcttcggcatgcggcaaatcgtcacgcaggc

SEQ ID NO: 3214 - DNA, 24 bp, Human herpesvirus 5
tcgcctatgcttcgcgcgtcacca

SEQ ID NO: 3215 - DNA, 24 bp, Human herpesvirus 5
aagtggtagacgtcttcggcatgc

SEQ ID NO: 3216 - DNA, 18 bp, Homo sapiens
gcctatgctatcgcttcc

SEQ ID NO: 3217 - DNA, 21 bp, Homo sapiens
gctatgctcctacagtgtcac

SEQ ID NO: 3218 - DNA, 20 bp, Homo sapiens
aactggtagatgtcttcaac

SEQ ID NO: 3219 - DNA, 93 bp, Human herpesvirus 5
gatgttcagcaggaagcgcatgatggacttcttggcgtcggtcgtcttgtcgtgccgctccatgagctccacgatccgctggctgttgagctc

SEQ ID NO: 3220 - DNA, 24 bp, Human herpesvirus 5
tccatgagctccacgatccgctgg

SEQ ID NO: 3221 - DNA, 24 bp, Human herpesvirus 5
atggacttcttggcgtcggtcgtc

SEQ ID NO: 3222 - DNA, 16 bp, Homo sapiens
tcctgagctccctgct

SEQ ID NO: 3223 - DNA, 21 bp, Homo sapiens
tccgtggccaacatccgctgg

SEQ ID NO: 3224 - DNA, 23 bp, Homo sapiens
tccatgagtgccacggggggtgg

SEQ ID NO: 3225 - DNA, 15 bp, Homo sapiens
tccatgagtccagct

SEQ ID NO: 3226 - DNA, 16 bp, Homo sapiens
ggacttctgtggtcgt

SEQ ID NO: 3227 - DNA, 18 bp, Homo sapiens
atgggcttcttggccttc

SEQ ID NO: 3228 - DNA, 68 bp, Human herpesvirus 5
aggagattgctattagtaagtggggccatttttatattaatggttacaatttctttagcacatttcct

SEQ ID NO: 3229 - DNA, 24 bp, Human herpesvirus 5
tacaatttctttagcacatttcct

SEQ ID NO: 3230 - DNA, 24 bp, Human herpesvirus 5
gattgctattagtaagtggggcca

SEQ ID NO: 3231 - DNA, 20 bp, Homo sapiens
aatttctttagcaaaaacct

SEQ ID NO: 3232 - DNA, 15 bp, Homo sapiens
tttcttacatttcct

SEQ ID NO: 3233 - DNA, 18 bp, Homo sapiens
tttctttgggcatttcct

SEQ ID NO: 3234 - DNA, 14 bp, Homo sapiens
tttcccacatttcc

SEQ ID NO: 3235 - DNA, 20 bp, Homo sapiens
cagtttctcttgcatttcct

SEQ ID NO: 3236 - DNA, 17 bp, Homo sapiens
aatttctttagccattt

SEQ ID NO: 3237 - DNA, 20 bp, Homo sapiens
aatctctggacacattttct

SEQ ID NO: 3238 - DNA, 21 bp, Homo sapiens
atttctttggtcacattttct

SEQ ID NO: 3239 - DNA, 20 bp, Homo sapiens
caatttctgtggctcatcct

SEQ ID NO: 3240 - DNA, 21 bp, Homo sapiens
taaatttcttatagacatttc

SEQ ID NO: 3241 - DNA, 20 bp, Homo sapiens
atttctttagtgtaggtcct

SEQ ID NO: 3242 - DNA, 24 bp, Homo sapiens
caatttctttgtcatccattttct

SEQ ID NO: 3243 - DNA, 21 bp, Homo sapiens
caatttctttttatttttcct

SEQ ID NO: 3244 - DNA, 66 bp, Human herpesvirus 5
cagctgggtggccaggccggagaggctctggcccgggtccagcagcttctgcatgttgcccagctg

SEQ ID NO: 3245 - DNA, 24 bp, Human herpesvirus 5
cagcagcttctgcatgttgcccag

SEQ ID NO: 3246 - DNA, 24 bp, Human herpesvirus 5
aggccggagaggctctggcccggg

SEQ ID NO: 3247 - DNA, 17 bp, Homo sapiens
agcagcttctctggttg

SEQ ID NO: 3248 - DNA, 17 bp, Homo sapiens
acagcttctgcctggcc

SEQ ID NO: 3249 - DNA, 17 bp, Homo sapiens
acagcttctgtggctgc

SEQ ID NO: 3250 - DNA, 15 bp, Homo sapiens
agcagcttcttgtcc

SEQ ID NO: 3251 - DNA, 19 bp, Homo sapiens
cagcagattctgcactcca

SEQ ID NO: 3252 - DNA, 17 bp, Homo sapiens
gcagtgtgtatgttgcc

SEQ ID NO: 3253 - DNA, 23 bp, Homo sapiens
cagagttttgctctgttgcccag

SEQ ID NO: 3254 - DNA, 18 bp, Homo sapiens
cagtgcttctgtgtcccc

SEQ ID NO: 3255 - DNA, 21 bp, Homo sapiens
gctggcttctgcgcacgcgcc

SEQ ID NO: 3256 - DNA, 18 bp, Homo sapiens
agcagcttctggcgggct

SEQ ID NO: 3257 - DNA, 22 bp, Homo sapiens
gctgcttctgctgcagcctcag

SEQ ID NO: 3258 - DNA, 23 bp, Homo sapiens
cagcaacttctgggccagctcag

SEQ ID NO: 3259 - DNA, 18 bp, Homo sapiens
agcttttcatctgcccag

SEQ ID NO: 3260 - DNA, 16 bp, Homo sapiens
caacagcttctggccc

SEQ ID NO: 3261 - DNA, 23 bp, Homo sapiens
cagggttttgctatgttgcccag

SEQ ID NO: 3262 - DNA, 17 bp, Homo sapiens
cagcagcttctgatgtt

SEQ ID NO: 3263 - DNA, 16 bp, Homo sapiens
gcagtgtctgttgccc

SEQ ID NO: 3264 - DNA, 19 bp, Homo sapiens
gcaggcccgtgttgcccag

SEQ ID NO: 3265 - DNA, 21 bp, Homo sapiens
gcggctcttgacatgttgccc

SEQ ID NO: 3266 - DNA, 23 bp, Homo sapiens
cagggtctcgctatgttgcccag

SEQ ID NO: 3267 - DNA, 23 bp, Homo sapiens
cagggtctccctatgttgcccag

SEQ ID NO: 3268 - DNA, 18 bp, Homo sapiens
gcggcctctgcaaacggc

SEQ ID NO: 3269 - DNA, 14 bp, Homo sapiens
gcttctgctgtcca

SEQ ID NO: 3270 - DNA, 18 bp, Homo sapiens
acagtttctgcactagtt

SEQ ID NO: 3271 - DNA, 18 bp, Homo sapiens
agcagcttccgccatcca

SEQ ID NO: 3272 - DNA, 17 bp, Homo sapiens
agcaggcatgttgccca

SEQ ID NO: 3273 - DNA, 18 bp, Homo sapiens
tcttgctctgttgcccag

SEQ ID NO: 3274 - DNA, 18 bp, Homo sapiens
acagcttctgttgaaggc

SEQ ID NO: 3275 - DNA, 21 bp, Homo sapiens
gcagcttctgtccccacccag

SEQ ID NO: 3276 - DNA, 19 bp, Homo sapiens
cagcagcttcagaccagcc

SEQ ID NO: 3277 - DNA, 19 bp, Homo sapiens
cagcggctgctgcgtgttg

SEQ ID NO: 3278 - DNA, 19 bp, Homo sapiens
cagtagctctgtttgccca

SEQ ID NO: 3279 - DNA, 15 bp, Homo sapiens
cagcagcctttggtt

SEQ ID NO: 3280 - DNA, 15 bp, Homo sapiens
cagagcttctgcccc

SEQ ID NO: 3281 - DNA, 18 bp, Homo sapiens
cagcagctctgggcagcc

SEQ ID NO: 3282 - DNA, 19 bp, Homo sapiens
gcttcaccatgttgcccag

SEQ ID NO: 3283 - DNA, 15 bp, Homo sapiens
acagcttctgcaccc

SEQ ID NO: 3284 - DNA, 17 bp, Homo sapiens
gactggagaggcctcgg

SEQ ID NO: 3285 - DNA, 16 bp, Homo sapiens
aggcggggctggcccg

SEQ ID NO: 3286 - DNA, 22 bp, Homo sapiens
gactgggggctaggggcccggg

SEQ ID NO: 3287 - DNA, 18 bp, Homo sapiens
ggctggagtggccctcgg

SEQ ID NO: 3288 - DNA, 21 bp, Homo sapiens
aggcctggggaggctctcggg

SEQ ID NO: 3289 - DNA, 17 bp, Homo sapiens
aggttggggagctctgg

SEQ ID NO: 3290 - DNA, 19 bp, Homo sapiens
aggctggggaggcccctgg

SEQ ID NO: 3291 - DNA, 23 bp, Homo sapiens
ggctggggggcggcaggcccggg

SEQ ID NO: 3292 - DNA, 22 bp, Homo sapiens
ggccggaggggtgcaggctggg

SEQ ID NO: 3293 - DNA, 20 bp, Homo sapiens
ggcgggggcccgggcccggg

SEQ ID NO: 3294 - DNA, 23 bp, Homo sapiens
aggcgcggggagcgtggcccggg

SEQ ID NO: 3295 - DNA, 20 bp, Homo sapiens
gccggaggcccgggcttggg

SEQ ID NO: 3296 - DNA, 18 bp, Homo sapiens
ggccggagcgccgcctgg

SEQ ID NO: 3297 - DNA, 21 bp, Homo sapiens
agcctggggaggctccaaggg

SEQ ID NO: 3298 - DNA, 26 bp, Homo sapiens
ggtcgggtgggctctggcggcctggg

SEQ ID NO: 3299 - DNA, 19 bp, Homo sapiens
ggccggagaggctctgcgg

SEQ ID NO: 3300 - DNA, 19 bp, Homo sapiens
ggctggagaggcgcccagg

SEQ ID NO: 3301 - DNA, 19 bp, Homo sapiens
ggctggggcgtggcccggg

SEQ ID NO: 3302 - DNA, 17 bp, Homo sapiens
aggccgggaggctctgg

SEQ ID NO: 3303 - DNA, 22 bp, Homo sapiens
aggccagagggaggggcttggg

SEQ ID NO: 3304 - DNA, 22 bp, Homo sapiens
ggctggggcggccaaacccggg

SEQ ID NO: 3305 - DNA, 20 bp, Homo sapiens
ggcccgaggggcgcgccggg

SEQ ID NO: 3306 - DNA, 19 bp, Homo sapiens
aggctggggccgggcccgg

SEQ ID NO: 3307 - DNA, 23 bp, Homo sapiens
ggctgggggcgccggggcccggg

SEQ ID NO: 3308 - DNA, 19 bp, Homo sapiens
aggccggagcggattctgg

SEQ ID NO: 3309 - DNA, 20 bp, Homo sapiens
ggcggaggcggtggcccggg

SEQ ID NO: 3310 - DNA, 22 bp, Homo sapiens
ggcaggagagacaccgcttggg

SEQ ID NO: 3311 - DNA, 23 bp, Homo sapiens
ggccgggtggggcgaagcccggg

SEQ ID NO: 3312 - DNA, 23 bp, Homo sapiens
aggctgcggggagggggctcggg

SEQ ID NO: 3313 - DNA, 21 bp, Homo sapiens
ggagttggggacaggcccggg

SEQ ID NO: 3314 - DNA, 21 bp, Homo sapiens
aggccagagaggccggctggg

SEQ ID NO: 3315 - DNA, 17 bp, Homo sapiens
ggccgagagccgtccgg

SEQ ID NO: 3316 - DNA, 18 bp, Homo sapiens
ggtgggagaggcatctgg

SEQ ID NO: 3317 - DNA, 22 bp, Homo sapiens
ggctgggggcggtgggcccggg

SEQ ID NO: 3318 - DNA, 22 bp, Homo sapiens
agactggggagggggccttggg

SEQ ID NO: 3319 - DNA, 18 bp, Homo sapiens
aggctggcgggggcccgg

SEQ ID NO: 3320 - DNA, 21 bp, Homo sapiens
ggccagagaggcttgcttggg

SEQ ID NO: 3321 - DNA, 15 bp, Homo sapiens
ggccggtggggcccg

SEQ ID NO: 3322 - DNA, 17 bp, Homo sapiens
aggtggaggggctctgg

SEQ ID NO: 3323 - DNA, 19 bp, Homo sapiens
aggctggaggggctcgtgg

SEQ ID NO: 3324 - DNA, 21 bp, Homo sapiens
aggctggagggctgcagtggg

SEQ ID NO: 3325 - DNA, 64 bp, Human herpesvirus 5
gtcgaagaggctggcgtgcgcgttccactcgtccgagacctgccgcaccgtcgcactgttaaac

SEQ ID NO: 3326 - DNA, 24 bp, Human herpesvirus 5
tggcgtgcgcgttccactcgtccg

SEQ ID NO: 3327 - DNA, 24 bp, Human herpesvirus 5
acctgccgcaccgtcgcactgtta

SEQ ID NO: 3328 - DNA, 21 bp, Homo sapiens
tggctgcgcgttcctctcccg

SEQ ID NO: 3329 - DNA, 18 bp, Homo sapiens
tggcgtgcgcgtccctcg

SEQ ID NO: 3330 - DNA, 19 bp, Homo sapiens
acctaccacttgtgctgtt

SEQ ID NO: 3331 - DNA, 21 bp, Homo sapiens
ctgttccgtccaaacactgtt

SEQ ID NO: 3332 - DNA, 20 bp, Homo sapiens
tgctgcaccgtctccttgtt

SEQ ID NO: 3333 - DNA, 78 bp, Human herpesvirus 5
gcgcggcacagtgccaacgcgaagcgcgcatgcgcacgttgaactgcgcatgcgtcggcgtcggtgttgttgccgggc

SEQ ID NO: 3334 - DNA, 24 bp, Human herpesvirus 5
acgcgaagcgcgcatgcgcacgtt

SEQ ID NO: 3335 - DNA, 24 bp, Human herpesvirus 5
tgcgtcggcgtcggtgttgttgcc

SEQ ID NO: 3336 - DNA, 21 bp, Homo sapiens
acgcaggcgcgcgtgcgtgcg

SEQ ID NO: 3337 - DNA, 20 bp, Homo sapiens
cgctgaggcggacgcacgtt

SEQ ID NO: 3338 - DNA, 21 bp, Homo sapiens
tggttggtgtcaaatgttgtc

SEQ ID NO: 3339 - DNA, 19 bp, Homo sapiens
tggttggcttttgttgttg

SEQ ID NO: 3340 - DNA, 97 bp, Human herpesvirus 5
tcccgtaatactccgcgatcagttaccgtggcgacgtttcagggcgcatgcgcctctggaagcggtaccgcgggcgcgtcgtgggcacagtacgggg

SEQ ID NO: 3341 - DNA, 24 bp, Human herpesvirus 5
tggaagcggtaccgcgggcgcgtc

SEQ ID NO: 3342 - DNA, 24 bp, Human herpesvirus 5
taccgtggcgacgtttcagggcgc

SEQ ID NO: 3343 - DNA, 17 bp, Homo sapiens
accgtggcggcgtgtgc

SEQ ID NO: 3344 - DNA, 107 bp, Human herpesvirus 5
aacagccgttattagttaattgcttatggccagtccctagctttgaagaagcagcttctacattttgttttgagggtgctggctttgatcaatgtaatggtgctgtt

SEQ ID NO: 3345 - DNA, 24 bp, Human herpesvirus 5
ttgcttatggccagtccctagctt

SEQ ID NO: 3346 - DNA, 24 bp, Human herpesvirus 5
tctacattttgttttgagggtgct

SEQ ID NO: 3347 - DNA, 24 bp, Homo sapiens
ttgtttatagccatggcctggctt

SEQ ID NO: 3348 - DNA, 14 bp, Homo sapiens
ttgcttatgaagct

SEQ ID NO: 3349 - DNA, 18 bp, Homo sapiens
ttgcttatggttgtcccc

SEQ ID NO: 3350 - DNA, 21 bp, Homo sapiens
ttgcttattgtgtttctctag

SEQ ID NO: 3351 - DNA, 62 bp, Human herpesvirus 5
gctctgttcccgcatagctgatcccgtataaatataataacggagaaagcgtaacggagagc

SEQ ID NO: 3352 - DNA, 21 bp, Human herpesvirus 5
ggagaaagcgtaacggagagc

SEQ ID NO: 3353 - DNA, 24 bp, Human herpesvirus 5
tcccgcatagctgatcccgtataa

SEQ ID NO: 3354 - DNA, 20 bp, Homo sapiens
gggaaagcgcggctcagagc

SEQ ID NO: 3355 - DNA, 17 bp, Homo sapiens
ggagagcggcggagagc

SEQ ID NO: 3356 - DNA, 19 bp, Homo sapiens
ggagaaagtgtcgcaccgg

SEQ ID NO: 3357 - DNA, 15 bp, Homo sapiens
ggagaaagagcagag

SEQ ID NO: 3358 - DNA, 18 bp, Homo sapiens
ggtgagtagtcggagagc

SEQ ID NO: 3359 - DNA, 21 bp, Homo sapiens
gggaaggctggaaaagggagc

SEQ ID NO: 3360 - DNA, 19 bp, Homo sapiens
ggagggggcgcagaatagc

SEQ ID NO: 3361 - DNA, 18 bp, Homo sapiens
ggagagggcaccgagagc

SEQ ID NO: 3362 - DNA, 18 bp, Homo sapiens
ggagagaggtcggagagc

SEQ ID NO: 3363 - DNA, 19 bp, Homo sapiens
agagaaagtgtaagcagag

SEQ ID NO: 3364 - DNA, 18 bp, Homo sapiens
gaaaggaacacggagagc

SEQ ID NO: 3365 - DNA, 22 bp, Homo sapiens
ggagaaagggtgaaactaggag

SEQ ID NO: 3366 - DNA, 17 bp, Homo sapiens
ggagaaagctggcaaag

SEQ ID NO: 3367 - DNA, 18 bp, Homo sapiens
gaagaaagcgccgagggc

SEQ ID NO: 3368 - DNA, 15 bp, Homo sapiens
gaagaacgcggagag

SEQ ID NO: 3369 - DNA, 18 bp, Homo sapiens
ggagaaagcctgggaagc

SEQ ID NO: 3370 - DNA, 15 bp, Homo sapiens
ggaaaaagctgagag

SEQ ID NO: 3371 - DNA, 23 bp, Homo sapiens
ggagagacgtgcagatggagagc

SEQ ID NO: 3372 - DNA, 19 bp, Homo sapiens
ggagaaaggagctgggagc

SEQ ID NO: 3373 - DNA, 16 bp, Homo sapiens
agagattaacggagag

SEQ ID NO: 3374 - DNA, 20 bp, Homo sapiens
gaagggtaggcgcggagagc

SEQ ID NO: 3375 - DNA, 15 bp, Homo sapiens
gaagaaggcacagag

SEQ ID NO: 3376 - DNA, 20 bp, Homo sapiens
ggagaaggatgtagcaggag

SEQ ID NO: 3377 - DNA, 18 bp, Homo sapiens
gggaaagcacaagagggc

SEQ ID NO: 3378 - DNA, 20 bp, Homo sapiens
ggtagagcgcggcggagagc

SEQ ID NO: 3379 - DNA, 20 bp, Homo sapiens
gggggtcgggaacggagagc

SEQ ID NO: 3380 - DNA, 18 bp, Homo sapiens
gaaagagcagcagagagc

SEQ ID NO: 3381 - DNA, 21 bp, Homo sapiens
ggagaaagcagtggcagacag

SEQ ID NO: 3382 - DNA, 16 bp, Homo sapiens
ggagaaagtgtggatg

SEQ ID NO: 3383 - DNA, 18 bp, Homo sapiens
agagagcgagctgggagc

SEQ ID NO: 3384 - DNA, 19 bp, Homo sapiens
ggagaaaatgacttagagc

SEQ ID NO: 3385 - DNA, 14 bp, Homo sapiens
gggaaagcgcgagg

SEQ ID NO: 3386 - DNA, 16 bp, Homo sapiens
ggagagggtaggagag

SEQ ID NO: 3387 - DNA, 17 bp, Homo sapiens
ggaggcggacggagagc

SEQ ID NO: 3388 - DNA, 20 bp, Homo sapiens
ggaggcaaggtagggagagc

SEQ ID NO: 3389 - DNA, 18 bp, Homo sapiens
ggaggggacagagagagc

SEQ ID NO: 3390 - DNA, 16 bp, Homo sapiens
ggagaaaacaggagag

SEQ ID NO: 3391 - DNA, 18 bp, Homo sapiens
ggagagcgcgggaggagc

SEQ ID NO: 3392 - DNA, 17 bp, Homo sapiens
agagagcgccttcagag

SEQ ID NO: 3393 - DNA, 19 bp, Homo sapiens
gggatggcgtccagagagc

SEQ ID NO: 3394 - DNA, 16 bp, Homo sapiens
ggagaaagagcaggag

SEQ ID NO: 3395 - DNA, 23 bp, Homo sapiens
agagaaaagccggggcggagggc

SEQ ID NO: 3396 - DNA, 19 bp, Homo sapiens
gggacttataacggagggc

SEQ ID NO: 3397 - DNA, 18 bp, Homo sapiens
ggagaaagtgcgttacgg

SEQ ID NO: 3398 - DNA, 18 bp, Homo sapiens
ggagagcgcagggagagc

SEQ ID NO: 3399 - DNA, 21 bp, Homo sapiens
gaggaagcgggtgcggagagc

SEQ ID NO: 3400 - DNA, 24 bp, Homo sapiens
ggagaaagtgcaaattacaggagc

SEQ ID NO: 3401 - DNA, 16 bp, Homo sapiens
ggcagagagcgcagag

SEQ ID NO: 3402 - DNA, 19 bp, Homo sapiens
ggagaacgggcgcggagag

SEQ ID NO: 3403 - DNA, 16 bp, Homo sapiens
agaggagcacggagag

SEQ ID NO: 3404 - DNA, 20 bp, Homo sapiens
agagaggaagcctggagagc

SEQ ID NO: 3405 - DNA, 17 bp, Homo sapiens
ggagggcagcagagagc

SEQ ID NO: 3406 - DNA, 15 bp, Homo sapiens
agagaaagtggagag

SEQ ID NO: 3407 - DNA, 18 bp, Homo sapiens
ggagaaagttacgcaggc

SEQ ID NO: 3408 - DNA, 19 bp, Homo sapiens
ggagaaagttgccgggagc

SEQ ID NO: 3409 - DNA, 19 bp, Homo sapiens
agagaaattggcggagagc

SEQ ID NO: 3410 - DNA, 20 bp, Homo sapiens
agagagagagaccggagagc

SEQ ID NO: 3411 - DNA, 16 bp, Homo sapiens
ggaggttgcagagagc

SEQ ID NO: 3412 - DNA, 17 bp, Homo sapiens
gggcaggtcacagagag

SEQ ID NO: 3413 - DNA, 17 bp, Homo sapiens
ggagaaagcttagatag

SEQ ID NO: 3414 - DNA, 17 bp, Homo sapiens
gagaaagttccggagag

SEQ ID NO: 3415 - DNA, 60 bp, Human herpesvirus 5
gcgcatgcgcctgggggctttctatgcgcgcatacgcgcgcagctcgcgggtgtatgcgt

SEQ ID NO: 3416 - DNA, 20 bp, Human herpesvirus 5
cagctcgcgggtgtatgcgt

SEQ ID NO: 3417 - DNA, 24 bp, Human herpesvirus 5
gcgcctgggggctttctatgcgcg

SEQ ID NO: 3418 - DNA, 18 bp, Homo sapiens
gcttcgggagcctcgcgt

SEQ ID NO: 3419 - DNA, 17 bp, Homo sapiens
cagctcgcggctgacat

SEQ ID NO: 3420 - DNA, 19 bp, Homo sapiens
caggtcgcgggccgagcgt

SEQ ID NO: 3421 - DNA, 18 bp, Homo sapiens
gctcgcacgcacgtgtgt

SEQ ID NO: 3422 - DNA, 15 bp, Homo sapiens
caactcgtatatgcg

SEQ ID NO: 3423 - DNA, 18 bp, Homo sapiens
cagctcgctgcttcgcgt

SEQ ID NO: 3424 - DNA, 19 bp, Homo sapiens
gcgcggcgggtgtgtgcgt

SEQ ID NO: 3425 - DNA, 20 bp, Homo sapiens
agcacatggggtgtatgtgt

SEQ ID NO: 3426 - DNA, 18 bp, Homo sapiens
cagcacgtgggcatgcgt

SEQ ID NO: 3427 - DNA, 16 bp, Homo sapiens
gctccgggacacacgt

SEQ ID NO: 3428 - DNA, 25 bp, Homo sapiens
gctctgggggttgcaggcttgtgcg

SEQ ID NO: 3429 - DNA, 17 bp, Homo sapiens
gcgcctggggctctgcg

SEQ ID NO: 3430 - DNA, 17 bp, Homo sapiens
tgggggctttcacggcg

SEQ ID NO: 3431 - DNA, 19 bp, Homo sapiens
gcgctcggggactgtgcgc

SEQ ID NO: 3432 - DNA, 22 bp, Homo sapiens
gcccctgggggcgagatgcgcg

SEQ ID NO: 3433 - DNA, 130 bp, Human herpesvirus 5
gggggtcggggggtgcgcagggcggtgccccgggtcggaacccccgggtgcggttcgggcggcggggcttcccggctccttccaccggctcgcccgggggtcggggcgatgccctggcctcccctccccc

SEQ ID NO: 3434 - DNA, 21 bp, Human herpesvirus 5
tgccctggcctcccctccccc

SEQ ID NO: 3435 - DNA, 24 bp, Human herpesvirus 5
cccccgggtgcggttcgggcggcg

SEQ ID NO: 3436 - DNA, 19 bp, Homo sapiens
tgctcctgatcctttcccc

SEQ ID NO: 3437 - DNA, 16 bp, Homo sapiens
ccctctcccctctccc

SEQ ID NO: 3438 - DNA, 18 bp, Homo sapiens
gccctggccttgggccct

SEQ ID NO: 3439 - DNA, 17 bp, Homo sapiens
gctctgtctcccctccc

SEQ ID NO: 3440 - DNA, 21 bp, Homo sapiens
tgccctggccccagcaccccc

SEQ ID NO: 3441 - DNA, 18 bp, Homo sapiens
tgctactgacccctcccc

SEQ ID NO: 3442 - DNA, 18 bp, Homo sapiens
ctgccaacaccctccccc

SEQ ID NO: 3443 - DNA, 15 bp, Homo sapiens
gccacctcccctccc

SEQ ID NO: 3444 - DNA, 16 bp, Homo sapiens
gccccaacctctcccc

SEQ ID NO: 3445 - DNA, 20 bp, Homo sapiens
tactctggcctcaacaaccc

SEQ ID NO: 3446 - DNA, 19 bp, Homo sapiens
gccctccaggcccctcctc

SEQ ID NO: 3447 - DNA, 15 bp, Homo sapiens
cccttccccctcccc

SEQ ID NO: 3448 - DNA, 21 bp, Homo sapiens
gccttggcaatccttttcctc

SEQ ID NO: 3449 - DNA, 20 bp, Homo sapiens
tgccctgaacaccttttccc

SEQ ID NO: 3450 - DNA, 17 bp, Homo sapiens
ccctggcccctctcccc

SEQ ID NO: 3451 - DNA, 17 bp, Homo sapiens
gccccctgcccctcccc

SEQ ID NO: 3452 - DNA, 14 bp, Homo sapiens
acccctcccctccc

SEQ ID NO: 3453 - DNA, 17 bp, Homo sapiens
tgccctggcccactccc

SEQ ID NO: 3454 - DNA, 16 bp, Homo sapiens
tgccagcctcttctcc

SEQ ID NO: 3455 - DNA, 29 bp, Homo sapiens
gccctggcactctgtaaagcttctccggg

SEQ ID NO: 3456 - DNA, 19 bp, Homo sapiens
tgccattggggcctccccc

SEQ ID NO: 3457 - DNA, 20 bp, Homo sapiens
cctcctccctcccctcctcc

SEQ ID NO: 3458 - DNA, 18 bp, Homo sapiens
ccccctccctctccttcc

SEQ ID NO: 3459 - DNA, 18 bp, Homo sapiens
gcctttagcctccctccc

SEQ ID NO: 3460 - DNA, 17 bp, Homo sapiens
gccctcccccctccccc

SEQ ID NO: 3461 - DNA, 17 bp, Homo sapiens
tgccagcctccttttcc

SEQ ID NO: 3462 - DNA, 18 bp, Homo sapiens
tgctgtgatttcccctcc

SEQ ID NO: 3463 - DNA, 20 bp, Homo sapiens
tgctgtgtagaccctccccc

SEQ ID NO: 3464 - DNA, 19 bp, Homo sapiens
ctctcccattccctccccc

SEQ ID NO: 3465 - DNA, 20 bp, Homo sapiens
gccaaaacattcccctcccc

SEQ ID NO: 3466 - DNA, 19 bp, Homo sapiens
ctgttctcatccctccccc

SEQ ID NO: 3467 - DNA, 19 bp, Homo sapiens
gctctggccccaatcctcc

SEQ ID NO: 3468 - DNA, 19 bp, Homo sapiens
tggccttaccccctccccc

SEQ ID NO: 3469 - DNA, 19 bp, Homo sapiens
tgccccagagcctctctcc

SEQ ID NO: 3470 - DNA, 17 bp, Homo sapiens
cgctccctcccctcccc

SEQ ID NO: 3471 - DNA, 18 bp, Homo sapiens
gcccctcgctccctcccc

SEQ ID NO: 3472 - DNA, 23 bp, Homo sapiens
ccctggctcagagcccttcctcc

SEQ ID NO: 3473 - DNA, 19 bp, Homo sapiens
taccctggaattcttccct

SEQ ID NO: 3474 - DNA, 22 bp, Homo sapiens
gccctggcctccaccgttttcc

SEQ ID NO: 3475 - DNA, 19 bp, Homo sapiens
gccctggctgaccctcccc

SEQ ID NO: 3476 - DNA, 18 bp, Homo sapiens
tgccctgggctccaacct

SEQ ID NO: 3477 - DNA, 20 bp, Homo sapiens
cccctccgtctcctctcccc

SEQ ID NO: 3478 - DNA, 14 bp, Homo sapiens
cccttcccctcccc

SEQ ID NO: 3479 - DNA, 19 bp, Homo sapiens
tgccccggcaggttccctc

SEQ ID NO: 3480 - DNA, 19 bp, Homo sapiens
tgcccgggcctcccgcacc

SEQ ID NO: 3481 - DNA, 19 bp, Homo sapiens
ccctgagcccccctcctcc

SEQ ID NO: 3482 - DNA, 19 bp, Homo sapiens
ccctctatctccctccccc

SEQ ID NO: 3483 - DNA, 19 bp, Homo sapiens
cctcacactcccctccccc

SEQ ID NO: 3484 - DNA, 19 bp, Homo sapiens
tgcccctcactccctcccc

SEQ ID NO: 3485 - DNA, 15 bp, Homo sapiens
ccctcccccctcccc

SEQ ID NO: 3486 - DNA, 18 bp, Homo sapiens
gccctggcctctcaactc

SEQ ID NO: 3487 - DNA, 19 bp, Homo sapiens
gccctggcccagggctccc

SEQ ID NO: 3488 - DNA, 20 bp, Homo sapiens
tgctctacctccccttcccc

SEQ ID NO: 3489 - DNA, 17 bp, Homo sapiens
cccctcccccctccccc

SEQ ID NO: 3490 - DNA, 20 bp, Homo sapiens
actctggcttcccctccccc

SEQ ID NO: 3491 - DNA, 18 bp, Homo sapiens
gccctggccctgactccc

SEQ ID NO: 3492 - DNA, 20 bp, Homo sapiens
tgccttgctggccctccccc

SEQ ID NO: 3493 - DNA, 17 bp, Homo sapiens
tgctcgtctcccttccc

SEQ ID NO: 3494 - DNA, 20 bp, Homo sapiens
tgccctggctgtccagtccc

SEQ ID NO: 3495 - DNA, 17 bp, Homo sapiens
gctcccctcccttcccc

SEQ ID NO: 3496 - DNA, 19 bp, Homo sapiens
gcttatggaccctcccctc

SEQ ID NO: 3497 - DNA, 23 bp, Homo sapiens
taccctggccagttctctctccc

SEQ ID NO: 3498 - DNA, 20 bp, Homo sapiens
gcccagccctttccccttcc

SEQ ID NO: 3499 - DNA, 19 bp, Homo sapiens
gccagtccctcccctctcc

SEQ ID NO: 3500 - DNA, 18 bp, Homo sapiens
tgccctgggctccgagcc

SEQ ID NO: 3501 - DNA, 16 bp, Homo sapiens
ccctggctcctccccc

SEQ ID NO: 3502 - DNA, 16 bp, Homo sapiens
tgccctggatccctcc

SEQ ID NO: 3503 - DNA, 18 bp, Homo sapiens
tggccagccccctcttcc

SEQ ID NO: 3504 - DNA, 19 bp, Homo sapiens
cccccacctctctttcccc

SEQ ID NO: 3505 - DNA, 17 bp, Homo sapiens
gcccacctccctccccc

SEQ ID NO: 3506 - DNA, 18 bp, Homo sapiens
tgtcccggtctcgtcctc

SEQ ID NO: 3507 - DNA, 17 bp, Homo sapiens
tgccctggtcttgtccc

SEQ ID NO: 3508 - DNA, 19 bp, Homo sapiens
ccctggccagtctccttcc

SEQ ID NO: 3509 - DNA, 20 bp, Homo sapiens
tgccctgagttctttctccc

SEQ ID NO: 3510 - DNA, 19 bp, Homo sapiens
gctctggctcccctctccc

SEQ ID NO: 3511 - DNA, 16 bp, Homo sapiens
gcccggctcctctccc

SEQ ID NO: 3512 - DNA, 24 bp, Homo sapiens
tgccctgggccttgtgggaccccc

SEQ ID NO: 3513 - DNA, 17 bp, Homo sapiens
gccccttcccctcctcc

SEQ ID NO: 3514 - DNA, 18 bp, Homo sapiens
cctccgccttcccctccc

SEQ ID NO: 3515 - DNA, 22 bp, Homo sapiens
gccctggccacttctctcctcc

SEQ ID NO: 3516 - DNA, 15 bp, Homo sapiens
gccccatctctcccc

SEQ ID NO: 3517 - DNA, 19 bp, Homo sapiens
tgccctgacctctctgccc

SEQ ID NO: 3518 - DNA, 19 bp, Homo sapiens
gctccttaccccctccccc

SEQ ID NO: 3519 - DNA, 21 bp, Homo sapiens
gccctggctttgaatcctctc

SEQ ID NO: 3520 - DNA, 19 bp, Homo sapiens
tggctcccttccctccccc

SEQ ID NO: 3521 - DNA, 17 bp, Homo sapiens
cccctcccctctcctcc

SEQ ID NO: 3522 - DNA, 18 bp, Homo sapiens
ccctctcctcctcttccc

SEQ ID NO: 3523 - DNA, 17 bp, Homo sapiens
ccccctcccccctcccc

SEQ ID NO: 3524 - DNA, 18 bp, Homo sapiens
gccccctccccctctccc

SEQ ID NO: 3525 - DNA, 18 bp, Homo sapiens
tgcctggccctctctccc

SEQ ID NO: 3526 - DNA, 18 bp, Homo sapiens
cctggagtcccctcctcc

SEQ ID NO: 3527 - DNA, 22 bp, Homo sapiens
cccttcttgcttcccctccccc

SEQ ID NO: 3528 - DNA, 18 bp, Homo sapiens
tgccccctcccttccccc

SEQ ID NO: 3529 - DNA, 24 bp, Homo sapiens
gccttactggccttttccttctcc

SEQ ID NO: 3530 - DNA, 17 bp, Homo sapiens
gctctgctcccctctcc

SEQ ID NO: 3531 - DNA, 20 bp, Homo sapiens
gccggctgcctccccttccc

SEQ ID NO: 3532 - DNA, 17 bp, Homo sapiens
acccccgcccctccccc

SEQ ID NO: 3533 - DNA, 20 bp, Homo sapiens
ctgggagcttctcctccccc

SEQ ID NO: 3534 - DNA, 17 bp, Homo sapiens
tgccacccccctccccc

SEQ ID NO: 3535 - DNA, 15 bp, Homo sapiens
gccccctccctcccc

SEQ ID NO: 3536 - DNA, 16 bp, Homo sapiens
ccctaggcccctcccc

SEQ ID NO: 3537 - DNA, 19 bp, Homo sapiens
tgccctgaccttacattcc

SEQ ID NO: 3538 - DNA, 19 bp, Homo sapiens
gcccagccttccctcctcc

SEQ ID NO: 3539 - DNA, 18 bp, Homo sapiens
tggctcccctcctctccc

SEQ ID NO: 3540 - DNA, 17 bp, Homo sapiens
cctggcctcggtccccc

SEQ ID NO: 3541 - DNA, 20 bp, Homo sapiens
ccttcctcctcccctttccc

SEQ ID NO: 3542 - DNA, 21 bp, Homo sapiens
tgctttgacctccaaaggctc

SEQ ID NO: 3543 - DNA, 19 bp, Homo sapiens
gcccagcttcccctcctcc

SEQ ID NO: 3544 - DNA, 18 bp, Homo sapiens
tacccaggttccctcccc

SEQ ID NO: 3545 - DNA, 19 bp, Homo sapiens
gctcttacaccccctcccc

SEQ ID NO: 3546 - DNA, 21 bp, Homo sapiens
taccccaaactcctcttttcc

SEQ ID NO: 3547 - DNA, 22 bp, Homo sapiens
tggcctggcccttcccttcccc

SEQ ID NO: 3548 - DNA, 18 bp, Homo sapiens
tgctcagcccccttcccc

SEQ ID NO: 3549 - DNA, 18 bp, Homo sapiens
gcccactccccctccccc

SEQ ID NO: 3550 - DNA, 19 bp, Homo sapiens
tgcacctaagccctccccc

SEQ ID NO: 3551 - DNA, 15 bp, Homo sapiens
ccctcctccctcccc

SEQ ID NO: 3552 - DNA, 18 bp, Homo sapiens
gctcctgaccctctctcc

SEQ ID NO: 3553 - DNA, 19 bp, Homo sapiens
tgccagtgtctcctccccc

SEQ ID NO: 3554 - DNA, 19 bp, Homo sapiens
cccctttgccccctccccc

SEQ ID NO: 3555 - DNA, 20 bp, Homo sapiens
tactactggtcccctcctcc

SEQ ID NO: 3556 - DNA, 20 bp, Homo sapiens
gctcctgtttcccctccccc

SEQ ID NO: 3557 - DNA, 16 bp, Homo sapiens
ccccccatccctcccc

SEQ ID NO: 3558 - DNA, 16 bp, Homo sapiens
tgcacagcccctcccc

SEQ ID NO: 3559 - DNA, 15 bp, Homo sapiens
gccctaccccttccc

SEQ ID NO: 3560 - DNA, 21 bp, Homo sapiens
cccagggacttcccctccccc

SEQ ID NO: 3561 - DNA, 19 bp, Homo sapiens
taccttggcccccttcccc

SEQ ID NO: 3562 - DNA, 17 bp, Homo sapiens
cccccgcccccctcccc

SEQ ID NO: 3563 - DNA, 18 bp, Homo sapiens
tggcctccctcctcctcc

SEQ ID NO: 3564 - DNA, 18 bp, Homo sapiens
gccctccgctcctccccc

SEQ ID NO: 3565 - DNA, 16 bp, Homo sapiens
tgccagcccctcctcc

SEQ ID NO: 3566 - DNA, 19 bp, Homo sapiens
ccctgacagcttctccctc

SEQ ID NO: 3567 - DNA, 19 bp, Homo sapiens
gccctgcttttcctccccc

SEQ ID NO: 3568 - DNA, 17 bp, Homo sapiens
gccccctcttctctccc

SEQ ID NO: 3569 - DNA, 17 bp, Homo sapiens
gccctggcccagttccc

SEQ ID NO: 3570 - DNA, 18 bp, Homo sapiens
gccctttgccccctcccc

SEQ ID NO: 3571 - DNA, 17 bp, Homo sapiens
tgcccggcccggctccc

SEQ ID NO: 3572 - DNA, 20 bp, Homo sapiens
tgccccaactcctttcttcc

SEQ ID NO: 3573 - DNA, 15 bp, Homo sapiens
cctgcctcctccccc

SEQ ID NO: 3574 - DNA, 19 bp, Homo sapiens
gcctcaagcctcctcttcc

SEQ ID NO: 3575 - DNA, 18 bp, Homo sapiens
tgctttgacctcctgcct

SEQ ID NO: 3576 - DNA, 16 bp, Homo sapiens
tgctgccgtcccctcc

SEQ ID NO: 3577 - DNA, 18 bp, Homo sapiens
tgcgctgcctccttctcc

SEQ ID NO: 3578 - DNA, 18 bp, Homo sapiens
tggccggccccctccccc

SEQ ID NO: 3579 - DNA, 20 bp, Homo sapiens
tgctgcctccttccctcccc

SEQ ID NO: 3580 - DNA, 19 bp, Homo sapiens
tgcagcctccctctcctcc

SEQ ID NO: 3581 - DNA, 19 bp, Homo sapiens
ccctccacctccctccccc

SEQ ID NO: 3582 - DNA, 18 bp, Homo sapiens
tgcctgtgccatctcccc

SEQ ID NO: 3583 - DNA, 17 bp, Homo sapiens
ccccagctccctccccc

SEQ ID NO: 3584 - DNA, 21 bp, Homo sapiens
gccctgggcgcgtcctctccc

SEQ ID NO: 3585 - DNA, 20 bp, Homo sapiens
gcccagttcctcccttctcc

SEQ ID NO: 3586 - DNA, 17 bp, Homo sapiens
tgccctggctctgtccc

SEQ ID NO: 3587 - DNA, 18 bp, Homo sapiens
tgcctgtctctcccctcc

SEQ ID NO: 3588 - DNA, 21 bp, Homo sapiens
tgccctaggcggggatccccc

SEQ ID NO: 3589 - DNA, 18 bp, Homo sapiens
gcccgccctccctccccc

SEQ ID NO: 3590 - DNA, 16 bp, Homo sapiens
gccctgccccttcccc

SEQ ID NO: 3591 - DNA, 19 bp, Homo sapiens
gcctacggcctccttcccc

SEQ ID NO: 3592 - DNA, 18 bp, Homo sapiens
ccctgcccaccctccccc

SEQ ID NO: 3593 - DNA, 20 bp, Homo sapiens
ccctgcacctcccctcctcc

SEQ ID NO: 3594 - DNA, 19 bp, Homo sapiens
gccttagcctccctcctcc

SEQ ID NO: 3595 - DNA, 17 bp, Homo sapiens
cccaccgcccctccccc

SEQ ID NO: 3596 - DNA, 23 bp, Homo sapiens
tgccctaggtagtagccttccct

SEQ ID NO: 3597 - DNA, 18 bp, Homo sapiens
gctcccggcccttccctc

SEQ ID NO: 3598 - DNA, 19 bp, Homo sapiens
tgcgcacggcccctccccc

SEQ ID NO: 3599 - DNA, 18 bp, Homo sapiens
tgcccccctccctttccc

SEQ ID NO: 3600 - DNA, 19 bp, Homo sapiens
tgcccggccttggtcctcc

SEQ ID NO: 3601 - DNA, 21 bp, Homo sapiens
tactccattctcccctctccc

SEQ ID NO: 3602 - DNA, 17 bp, Homo sapiens
cgccctcctccccttcc

SEQ ID NO: 3603 - DNA, 19 bp, Homo sapiens
tgccctggcccttgagccc

SEQ ID NO: 3604 - DNA, 18 bp, Homo sapiens
ctgcgcggcccctccccc

SEQ ID NO: 3605 - DNA, 19 bp, Homo sapiens
cccttcccttcctttcccc

SEQ ID NO: 3606 - DNA, 19 bp, Homo sapiens
gccccccttctcctcctcc

SEQ ID NO: 3607 - DNA, 27 bp, Homo sapiens
tgcctctgaacaccctccccttccccg

SEQ ID NO: 3608 - DNA, 16 bp, Homo sapiens
gcccgcctcctttccc

SEQ ID NO: 3609 - DNA, 23 bp, Homo sapiens
tgccctgggcttgcccggctccc

SEQ ID NO: 3610 - DNA, 18 bp, Homo sapiens
gccccgatcccctccccc

SEQ ID NO: 3611 - DNA, 20 bp, Homo sapiens
ccggctccttcccctccccc

SEQ ID NO: 3612 - DNA, 19 bp, Homo sapiens
cccctcccagtcccttccc

SEQ ID NO: 3613 - DNA, 16 bp, Homo sapiens
ccctgactcctccccc

SEQ ID NO: 3614 - DNA, 19 bp, Homo sapiens
tacagggctttcctccccc

SEQ ID NO: 3615 - DNA, 18 bp, Homo sapiens
tgcacgcccccctccccc

SEQ ID NO: 3616 - DNA, 18 bp, Homo sapiens
tggcttctcccctccccc

SEQ ID NO: 3617 - DNA, 18 bp, Homo sapiens
gcgtggttcctcccctcc

SEQ ID NO: 3618 - DNA, 23 bp, Homo sapiens
gccctggctggctggctctccct

SEQ ID NO: 3619 - DNA, 19 bp, Homo sapiens
tgtcccccacccctccctc

SEQ ID NO: 3620 - DNA, 15 bp, Homo sapiens
gccccttcccctccc

SEQ ID NO: 3621 - DNA, 16 bp, Homo sapiens
ccccggccccttcccc

SEQ ID NO: 3622 - DNA, 18 bp, Homo sapiens
gccccaaatcccctcccc

SEQ ID NO: 3623 - DNA, 17 bp, Homo sapiens
gccaggctctcctcccc

SEQ ID NO: 3624 - DNA, 19 bp, Homo sapiens
tgccctggcctctacctcc

SEQ ID NO: 3625 - DNA, 21 bp, Homo sapiens
tgcctgatacccccctctccc

SEQ ID NO: 3626 - DNA, 18 bp, Homo sapiens
tgcggcctcctctcctcc

SEQ ID NO: 3627 - DNA, 22 bp, Homo sapiens
tggcctggcctcctctcttccg

SEQ ID NO: 3628 - DNA, 16 bp, Homo sapiens
tgcaccccccccctcc

SEQ ID NO: 3629 - DNA, 20 bp, Homo sapiens
tgccctggctcccatttccc

SEQ ID NO: 3630 - DNA, 21 bp, Homo sapiens
gccgcgaccctcccctcctcc

SEQ ID NO: 3631 - DNA, 21 bp, Homo sapiens
tgcgccacccctcttctcccc

SEQ ID NO: 3632 - DNA, 18 bp, Homo sapiens
ggcctgaacccctccccc

SEQ ID NO: 3633 - DNA, 16 bp, Homo sapiens
tgcctggcctcaatcc

SEQ ID NO: 3634 - DNA, 17 bp, Homo sapiens
tgcactgtcccctcccc

SEQ ID NO: 3635 - DNA, 18 bp, Homo sapiens
ctgtgtaccccctccccc

SEQ ID NO: 3636 - DNA, 18 bp, Homo sapiens
gcccgagcgctcccctcc

SEQ ID NO: 3637 - DNA, 18 bp, Homo sapiens
tgctctcctgcccctccc

SEQ ID NO: 3638 - DNA, 18 bp, Homo sapiens
gcccggtgtctctcctcc

SEQ ID NO: 3639 - DNA, 29 bp, Homo sapiens
tgccctgggcccggtgtctctcctccggg

SEQ ID NO: 3640 - DNA, 17 bp, Homo sapiens
ccccgagtcctctcccc

SEQ ID NO: 3641 - DNA, 18 bp, Homo sapiens
ccaaccttcccctccccc

SEQ ID NO: 3642 - DNA, 19 bp, Homo sapiens
tgcctggaggtgcctcccc

SEQ ID NO: 3643 - DNA, 18 bp, Homo sapiens
ccccttttctcctccccc

SEQ ID NO: 3644 - DNA, 22 bp, Homo sapiens
tgccctggtctgccgcggaccc

SEQ ID NO: 3645 - DNA, 18 bp, Homo sapiens
acagaagcttcccctccc

SEQ ID NO: 3646 - DNA, 22 bp, Homo sapiens
tgccctgggtctgggagcctcc

SEQ ID NO: 3647 - DNA, 18 bp, Homo sapiens
cccttccagccctccccc

SEQ ID NO: 3648 - DNA, 18 bp, Homo sapiens
cccccgccttccctctcc

SEQ ID NO: 3649 - DNA, 16 bp, Homo sapiens
ccccagcccctccccc

SEQ ID NO: 3650 - DNA, 20 bp, Homo sapiens
tgccccggccgtcgctcccc

SEQ ID NO: 3651 - DNA, 18 bp, Homo sapiens
tggcctggcctcaaatcc

SEQ ID NO: 3652 - DNA, 19 bp, Homo sapiens
gcacagccctccccttccc

SEQ ID NO: 3653 - DNA, 21 bp, Homo sapiens
tgccctgggttttccacttcc

SEQ ID NO: 3654 - DNA, 19 bp, Homo sapiens
ccctggccttccttttccc

SEQ ID NO: 3655 - DNA, 20 bp, Homo sapiens
ccccagtctttcccttcccc

SEQ ID NO: 3656 - DNA, 15 bp, Homo sapiens
gctctgcccctcccc

SEQ ID NO: 3657 - DNA, 17 bp, Homo sapiens
tgccctccccctccccc

SEQ ID NO: 3658 - DNA, 18 bp, Homo sapiens
tgctccacctccttcctc

SEQ ID NO: 3659 - DNA, 18 bp, Homo sapiens
cctcttccaccccctccc

SEQ ID NO: 3660 - DNA, 19 bp, Homo sapiens
gctcctgtgtcctctcccc

SEQ ID NO: 3661 - DNA, 19 bp, Homo sapiens
tgtcccggcctctgacccc

SEQ ID NO: 3662 - DNA, 21 bp, Homo sapiens
ccctggcctttttagtctccc

SEQ ID NO: 3663 - DNA, 19 bp, Homo sapiens
tgcagcagcctccccttcc

SEQ ID NO: 3664 - DNA, 18 bp, Homo sapiens
gccctggcctcagcactc

SEQ ID NO: 3665 - DNA, 23 bp, Homo sapiens
tgccctgggctctgggatgcccc

SEQ ID NO: 3666 - DNA, 19 bp, Homo sapiens
cccctgcatcccttccccc

SEQ ID NO: 3667 - DNA, 16 bp, Homo sapiens
ccctgctcccctcccc

SEQ ID NO: 3668 - DNA, 20 bp, Homo sapiens
gccttggcctcccaaagtcc

SEQ ID NO: 3669 - DNA, 18 bp, Homo sapiens
ccccgacttctttctccc

SEQ ID NO: 3670 - DNA, 19 bp, Homo sapiens
ctgatccttcccctctccc

SEQ ID NO: 3671 - DNA, 25 bp, Homo sapiens
tggcctggccccctgatccttcccc

SEQ ID NO: 3672 - DNA, 15 bp, Homo sapiens
tgccggacccctccc

SEQ ID NO: 3673 - DNA, 14 bp, Homo sapiens
ccctgaccctcccc

SEQ ID NO: 3674 - DNA, 17 bp, Homo sapiens
cctatcccccctccccc

SEQ ID NO: 3675 - DNA, 17 bp, Homo sapiens
gccctgtctcctccccc

SEQ ID NO: 3676 - DNA, 16 bp, Homo sapiens
tgcaccgtccctcccc

SEQ ID NO: 3677 - DNA, 17 bp, Homo sapiens
tgcctaccctccttccc

SEQ ID NO: 3678 - DNA, 17 bp, Homo sapiens
ccctggcttccctcccc

SEQ ID NO: 3679 - DNA, 16 bp, Homo sapiens
gccctctccccctccc

SEQ ID NO: 3680 - DNA, 16 bp, Homo sapiens
tgccctgagcccctcc

SEQ ID NO: 3681 - DNA, 15 bp, Homo sapiens
cccgcgcccctcccc

SEQ ID NO: 3682 - DNA, 18 bp, Homo sapiens
tgccctggccgggctccc

SEQ ID NO: 3683 - DNA, 17 bp, Homo sapiens
gcccttacccctccccc

SEQ ID NO: 3684 - DNA, 19 bp, Homo sapiens
gccctggtcccaccttctc

SEQ ID NO: 3685 - DNA, 16 bp, Homo sapiens
tgcccctggcccctcc

SEQ ID NO: 3686 - DNA, 20 bp, Homo sapiens
gccgctgcgctcccctcccc

SEQ ID NO: 3687 - DNA, 20 bp, Homo sapiens
gcccggccccttccttctcc

SEQ ID NO: 3688 - DNA, 19 bp, Homo sapiens
tgcccctcccctgcctccc

SEQ ID NO: 3689 - DNA, 17 bp, Homo sapiens
tgccgtgtccctcctcc

SEQ ID NO: 3690 - DNA, 17 bp, Homo sapiens
tgccaaactccctcccc

SEQ ID NO: 3691 - DNA, 17 bp, Homo sapiens
ccccatccccctccccc

SEQ ID NO: 3692 - DNA, 15 bp, Homo sapiens
cccttctccctcccc

SEQ ID NO: 3693 - DNA, 17 bp, Homo sapiens
cctacctcccctccccc

SEQ ID NO: 3694 - DNA, 20 bp, Homo sapiens
ccctcaacatctcctcctcc

SEQ ID NO: 3695 - DNA, 18 bp, Homo sapiens
tgtcccaccccctttccc

SEQ ID NO: 3696 - DNA, 19 bp, Homo sapiens
gctctggcctccgttcccc

SEQ ID NO: 3697 - DNA, 15 bp, Homo sapiens
ccctcgcccctcccc

SEQ ID NO: 3698 - DNA, 18 bp, Homo sapiens
tgcttggcctccttcccc

SEQ ID NO: 3699 - DNA, 19 bp, Homo sapiens
ctgtatcctcccctccccc

SEQ ID NO: 3700 - DNA, 26 bp, Homo sapiens
gccctggctcaaggatttctcccccg

SEQ ID NO: 3701 - DNA, 16 bp, Homo sapiens
gccctgacccttcccc

SEQ ID NO: 3702 - DNA, 19 bp, Homo sapiens
gctcctggcctccttctcc

SEQ ID NO: 3703 - DNA, 18 bp, Homo sapiens
ccctccctcccctttccc

SEQ ID NO: 3704 - DNA, 16 bp, Homo sapiens
cccactcccctccccc

SEQ ID NO: 3705 - DNA, 19 bp, Homo sapiens
cctatgggtcccctcctcc

SEQ ID NO: 3706 - DNA, 17 bp, Homo sapiens
cctcctccccctcctcc

SEQ ID NO: 3707 - DNA, 16 bp, Homo sapiens
tgcccttccttctccc

SEQ ID NO: 3708 - DNA, 18 bp, Homo sapiens
tgctttggcctctgctcc

SEQ ID NO: 3709 - DNA, 20 bp, Homo sapiens
gccctgaccgccccctctcc

SEQ ID NO: 3710 - DNA, 19 bp, Homo sapiens
gcctcacgacctctccctc

SEQ ID NO: 3711 - DNA, 19 bp, Homo sapiens
ccccacaagccccttcccc

SEQ ID NO: 3712 - DNA, 16 bp, Homo sapiens
acccctcccctccccc

SEQ ID NO: 3713 - DNA, 20 bp, Homo sapiens
cccccccctttccctccccc

SEQ ID NO: 3714 - DNA, 23 bp, Homo sapiens
tgccctggaccttcaatttctcc

SEQ ID NO: 3715 - DNA, 21 bp, Homo sapiens
cctggcctcaagtgatcctcc

SEQ ID NO: 3716 - DNA, 18 bp, Homo sapiens
cctggcctgggctcctcc

SEQ ID NO: 3717 - DNA, 17 bp, Homo sapiens
tgccctggccatactcc

SEQ ID NO: 3718 - DNA, 20 bp, Homo sapiens
ccactaacctcttctccccc

SEQ ID NO: 3719 - DNA, 15 bp, Homo sapiens
tgcggccccctctcc

SEQ ID NO: 3720 - DNA, 19 bp, Homo sapiens
ccctccctttccctccccc

SEQ ID NO: 3721 - DNA, 17 bp, Homo sapiens
tgccccccccctccccc

SEQ ID NO: 3722 - DNA, 20 bp, Homo sapiens
gccctggccgcgcctcctcc

SEQ ID NO: 3723 - DNA, 16 bp, Homo sapiens
ccctcccccctccccc

SEQ ID NO: 3724 - DNA, 17 bp, Homo sapiens
ccccctccccctccccc

SEQ ID NO: 3725 - DNA, 20 bp, Homo sapiens
ccctggcatcaccctccccc

SEQ ID NO: 3726 - DNA, 21 bp, Homo sapiens
taccctgagctcccctccccc

SEQ ID NO: 3727 - DNA, 17 bp, Homo sapiens
cgccctcgccctccccc

SEQ ID NO: 3728 - DNA, 21 bp, Homo sapiens
tgcccgccccctcccttcccc

SEQ ID NO: 3729 - DNA, 17 bp, Homo sapiens
gggtgcggcgggcggcg

SEQ ID NO: 3730 - DNA, 19 bp, Homo sapiens
cctccgggtgcgctcggcg

SEQ ID NO: 3731 - DNA, 18 bp, Homo sapiens
cccggggcgcggccgcgg

SEQ ID NO: 3732 - DNA, 16 bp, Homo sapiens
cctggctgcggcggcg

SEQ ID NO: 3733 - DNA, 16 bp, Homo sapiens
ggtgcaggaggcggcg

SEQ ID NO: 3734 - DNA, 20 bp, Homo sapiens
cctcgggctctcgggcggcg

SEQ ID NO: 3735 - DNA, 20 bp, Homo sapiens
cccgggtgtcgggcgcggcg

SEQ ID NO: 3736 - DNA, 18 bp, Homo sapiens
cccctggctgcgggcggc

SEQ ID NO: 3737 - DNA, 17 bp, Homo sapiens
cctggctgcggccggcg

SEQ ID NO: 3738 - DNA, 20 bp, Homo sapiens
cctgggtgtggtgacgggcg

SEQ ID NO: 3739 - DNA, 20 bp, Homo sapiens
cctcggcgcttcgggcggcg

SEQ ID NO: 3740 - DNA, 117 bp, Human herpesvirus 5
ctgacagtagcgggtaataaaaacaataggatttttatcgtttttttatgttacaaaacaacgtatcactttcacggtgatttattcttgctattccttttccccttgggctgtcag

SEQ ID NO: 3741 - DNA, 24 bp, Human herpesvirus 5
atcactttcacggtgatttattct

SEQ ID NO: 3742 - DNA, 24 bp, Human herpesvirus 5
agcgggtaataaaaacaataggat

SEQ ID NO: 3743 - DNA, 20 bp, Homo sapiens
atctactttcacatttattt

SEQ ID NO: 3744 - DNA, 22 bp, Homo sapiens
acttccacggtggggggcctct

SEQ ID NO: 3745 - DNA, 23 bp, Homo sapiens
atcactttcctattatttattct

SEQ ID NO: 3746 - DNA, 20 bp, Homo sapiens
atcatgacaagtgatttatt

SEQ ID NO: 3747 - DNA, 20 bp, Homo sapiens
ctttcacaggcacgtttatt

SEQ ID NO: 3748 - DNA, 22 bp, Homo sapiens
atcactttcgtggagccaatct

SEQ ID NO: 3749 - DNA, 18 bp, Homo sapiens
agtggggaataaaaacaa

SEQ ID NO: 3750 - DNA, 107 bp, Human herpesvirus 5
ctacgtggaaagcaagcccactaacgaactgtctcaacgactgcaacgtttcgtaaccaagcgaccgatgcccgttagcgacagcttcgtctgcctgcgacccgtag

SEQ ID NO: 3751 - DNA, 24 bp, Human herpesvirus 5
taacgaactgtctcaacgactgca

SEQ ID NO: 3752 - DNA, 24 bp, Human herpesvirus 5
cagcttcgtctgcctgcgacccgt

SEQ ID NO: 3753 - DNA, 17 bp, Homo sapiens
gaactgtctagaaaaca

SEQ ID NO: 3754 - DNA, 16 bp, Homo sapiens
gaactgtcaacactgc

SEQ ID NO: 3755 - DNA, 16 bp, Homo sapiens
cgaactgcagcgactg

SEQ ID NO: 3756 - DNA, 18 bp, Homo sapiens
gaggactgtctcagcctg

SEQ ID NO: 3757 - DNA, 15 bp, Homo sapiens
gaactgccttgactg

SEQ ID NO: 3758 - DNA, 20 bp, Homo sapiens
gccttcgtctgcagctccgt

SEQ ID NO: 3759 - DNA, 21 bp, Homo sapiens
cagcttcttctgcctagagcg

SEQ ID NO: 3760 - DNA, 61 bp, Human herpesvirus 5
catgcgcaacaggtccagcttaaaggcgcacttgtcattaaacaggctggacatgcgcgtg

SEQ ID NO: 3761 - DNA, 24 bp, Human herpesvirus 5
cattaaacaggctggacatgcgcg

SEQ ID NO: 3762 - DNA, 24 bp, Human herpesvirus 5
acaggtccagcttaaaggcgcact

SEQ ID NO: 3763 - DNA, 20 bp, Homo sapiens
catagaacaggctgggcaca

SEQ ID NO: 3764 - DNA, 20 bp, Homo sapiens
caggtccagttcatatgtgc

SEQ ID NO: 3765 - DNA, 20 bp, Homo sapiens
caggatcagcttaaggcggc

SEQ ID NO: 3766 - DNA, 14 bp, Homo sapiens
caggcccagcgcgc

SEQ ID NO: 3767 - DNA, 20 bp, Homo sapiens
acaggtccagttttaaaaca

SEQ ID NO: 3768 - DNA, 16 bp, Homo sapiens
caggcttagctacaca

SEQ ID NO: 3769 - DNA, 17 bp, Homo sapiens
acaggtttacttaaaaa

SEQ ID NO: 3770 - DNA, 16 bp, Homo sapiens
acaggtccagtctgca

SEQ ID NO: 3771 - DNA, 18 bp, Homo sapiens
agtccagcttggcctggc

SEQ ID NO: 3772 - DNA, 17 bp, Homo sapiens
acaggtccagttggcca

SEQ ID NO: 3773 - DNA, 61 bp, Human herpesvirus 5
atttgacccccagaactatgtatcagcctagagttgcaactagttctgactttgttcaaat

SEQ ID NO: 3774 - DNA, 24 bp, Human herpesvirus 5
cagaactatgtatcagcctagagt

SEQ ID NO: 3775 - DNA, 24 bp, Human herpesvirus 5
caactagttctgactttgttcaaa

SEQ ID NO: 3776 - DNA, 21 bp, Homo sapiens
cagaactgggtatcccagagt

SEQ ID NO: 3777 - DNA, 25 bp, Homo sapiens
cagaacttgccatgcagcttggagt

SEQ ID NO: 3778 - DNA, 22 bp, Homo sapiens
cagaagtgtggaagcctggagt

SEQ ID NO: 3779 - DNA, 22 bp, Homo sapiens
cagaatcatgaatccctagagt

SEQ ID NO: 3780 - DNA, 67 bp, Human herpesvirus 5
ctgtagaacttgccattctcattgacaacattaacaatacattagtcaatcttgaatggctcaatag

SEQ ID NO: 3781 - DNA, 24 bp, Human herpesvirus 5
tagaacttgccattctcattgaca

SEQ ID NO: 3782 - DNA, 21 bp, Human herpesvirus 5
caatcttgaatggctcaatag

SEQ ID NO: 3783 - DNA, 21 bp, Homo sapiens
gaaccccgcttttcattgaca

SEQ ID NO: 3784 - DNA, 24 bp, Homo sapiens
tagaactcaaggttttcattgaca

SEQ ID NO: 3785 - DNA, 21 bp, Homo sapiens
taaattatgctctcattgaca

SEQ ID NO: 3786 - DNA, 17 bp, Homo sapiens
ctgctgttctcactgca

SEQ ID NO: 3787 - DNA, 18 bp, Homo sapiens
tagaactgctattctgac

SEQ ID NO: 3788 - DNA, 84 bp, Human herpesvirus 5
gatcgtctgcccgcggccgctcacgttcacgccgtggaggatctggaagaattcgagcgtcagcggcgtggggaacagcacgtc

SEQ ID NO: 3789 - DNA, 24 bp, Human herpesvirus 5
ttcgagcgtcagcggcgtggggaa

SEQ ID NO: 3790 - DNA, 24 bp, Human herpesvirus 5
ggccgctcacgttcacgccgtgga

SEQ ID NO: 3791 - DNA, 18 bp, Homo sapiens
ggccgccgcgggctgtgg

SEQ ID NO: 3792 - DNA, 16 bp, Homo sapiens
ggccgctctgaccgtg

SEQ ID NO: 3793 - DNA, 19 bp, Homo sapiens
ggcgcttcgggcgccgtgg

SEQ ID NO: 3794 - DNA, 23 bp, Homo sapiens
ggccgtacgcccctcgccgtgga

SEQ ID NO: 3795 - DNA, 21 bp, Homo sapiens
ggcagctcacacagctgtgga

SEQ ID NO: 3796 - DNA, 129 bp, Human herpesvirus 5
gctgcgtggagagacggcggggaatgatcgtctccgatgcgggttgtggtttcccgagccggatcagagccctcacggatgcggttcggggacccgcggggagcgatctccgctgtcgtctcccgcggc

SEQ ID NO: 3797 - DNA, 24 bp, Human herpesvirus 5
atgcggttcggggacccgcgggga

SEQ ID NO: 3798 - DNA, 24 bp, Human herpesvirus 5
ttcccgagccggatcagagccctc

SEQ ID NO: 3799 - DNA, 19 bp, Homo sapiens
agctgcggggtccgcgggg

SEQ ID NO: 3800 - DNA, 18 bp, Homo sapiens
atgcagtttgggatgggg

SEQ ID NO: 3801 - DNA, 22 bp, Homo sapiens
cgcggtcccgggcctgcgggga

SEQ ID NO: 3802 - DNA, 20 bp, Homo sapiens
gtccggggaggcccgcgggg

SEQ ID NO: 3803 - DNA, 19 bp, Homo sapiens
gtccgggaggctcgcgggg

SEQ ID NO: 3804 - DNA, 21 bp, Homo sapiens
gcgggcgacgacccgcgggga

SEQ ID NO: 3805 - DNA, 20 bp, Homo sapiens
gcagctgggggtccgcgggg

SEQ ID NO: 3806 - DNA, 18 bp, Homo sapiens
tcccgagctgggggcccc

SEQ ID NO: 3807 - DNA, 26 bp, Homo sapiens
ttcccgaggctgaggcaagggtcctc

SEQ ID NO: 3808 - DNA, 14 bp, Homo sapiens
ccgagcagagccct

SEQ ID NO: 3809 - DNA, 20 bp, Homo sapiens
ctcctgagctggatcagagc

SEQ ID NO: 3810 - DNA, 22 bp, Homo sapiens
ttcccggcctgttggagccctc

SEQ ID NO: 3811 - DNA, 18 bp, Homo sapiens
ctcccgagctcgcgggtc

SEQ ID NO: 3812 - DNA, 17 bp, Homo sapiens
gaaccctcggagtcctc

SEQ ID NO: 3813 - DNA, 75 bp, Human herpesvirus 5
gtaaaatggccttggtatgtgtggctactaataggcttagtagtaatattttgcataccattactgctattttgc

SEQ ID NO: 3814 - DNA, 24 bp, Human herpesvirus 5
tggtatgtgtggctactaataggc

SEQ ID NO: 3815 - DNA, 20 bp, Human herpesvirus 5
taccattactgctattttgc

SEQ ID NO: 3816 - DNA, 21 bp, Homo sapiens
tggtatgtatgtagggatagg

SEQ ID NO: 3817 - DNA, 23 bp, Homo sapiens
tggaatgtgtggtgcacataggc

SEQ ID NO: 3818 - DNA, 22 bp, Homo sapiens
tggaatgtgtggagctggtggg

SEQ ID NO: 3819 - DNA, 23 bp, Homo sapiens
tgggtgtgtggctgcaggaaggc

SEQ ID NO: 3820 - DNA, 88 bp, Lumpy skin disease virus
tagacaatggactgtctttgtcttgaaaaagtatcttacgatagtagtaaagatatcttaagatatttctttagtctataactgtttg

SEQ ID NO: 3821 - DNA, 24 bp, Lumpy skin disease virus
tatcttaagatatttctttagtct

SEQ ID NO: 3822 - DNA, 24 bp, Lumpy skin disease virus
caatggactgtctttgtcttgaaa

SEQ ID NO: 3823 - DNA, 18 bp, Homo sapiens
caagggctgtgccttgaa

SEQ ID NO: 3824 - DNA, 22 bp, Homo sapiens
aatgtactgcgagttcttgaaa

SEQ ID NO: 3825 - DNA, 20 bp, Homo sapiens
tgatgttccattttgtcttg

SEQ ID NO: 3826 - DNA, 22 bp, Homo sapiens
caatggattttaaccatcttga

SEQ ID NO: 3827 - DNA, 17 bp, Homo sapiens
aatgaactgtctccttg

SEQ ID NO: 3828 - DNA, 19 bp, Homo sapiens
caatgactgttcctcttga

SEQ ID NO: 3829 - DNA, 18 bp, Homo sapiens
ggggccctttgtcttgaa

SEQ ID NO: 3830 - DNA, 16 bp, Homo sapiens
gggctgtctgccctga

SEQ ID NO: 3831 - DNA, 20 bp, Homo sapiens
aatggactgtttgtctgaaa

SEQ ID NO: 3832 - DNA, 23 bp, Homo sapiens
caatgtgattgtttcccttgaaa

SEQ ID NO: 3833 - DNA, 20 bp, Homo sapiens
atgaggtttttgtcttgaaa

SEQ ID NO: 3834 - DNA, 63 bp, Lumpy skin disease virus
gctaaaagagggttacgtgcccgggacggtgtcccacaaccacatgatgccctactttttagc

SEQ ID NO: 3835 - DNA, 24 bp, Lumpy skin disease virus
aagagggttacgtgcccgggacgg

SEQ ID NO: 3836 - DNA, 24 bp, Lumpy skin disease virus
accacatgatgccctactttttag

SEQ ID NO: 3837 - DNA, 24 bp, Homo sapiens
aggggtggtatgtgcccgggatgg

SEQ ID NO: 3838 - DNA, 22 bp, Homo sapiens
agagggctgcaaaaggggacgg

SEQ ID NO: 3839 - DNA, 17 bp, Homo sapiens
agaggattatgtgttgg

SEQ ID NO: 3840 - DNA, 18 bp, Homo sapiens
agggtgtgcccgggatgg

SEQ ID NO: 3841 - DNA, 21 bp, Homo sapiens
gaggggcagggcttggggcgg

SEQ ID NO: 3842 - DNA, 19 bp, Homo sapiens
gagggtgggtgtggggcgg

SEQ ID NO: 3843 - DNA, 23 bp, Homo sapiens
gagggcgcgcgggctcgggacgg

SEQ ID NO: 3844 - DNA, 22 bp, Homo sapiens
aaaagggtagtctctgggatgg

SEQ ID NO: 3845 - DNA, 23 bp, Homo sapiens
accacataatgtcagagctttag

SEQ ID NO: 3846 - DNA, 22 bp, Homo sapiens
cacatgttgcatctctttttag

SEQ ID NO: 3847 - DNA, 23 bp, Homo sapiens
caacgatgcctcttgctttttag

SEQ ID NO: 3848 - DNA, 19 bp, Homo sapiens
catgatgctgacattttag

SEQ ID NO: 3849 - DNA, 21 bp, Homo sapiens
ccacctgaggctactttttag

SEQ ID NO: 3850 - DNA, 18 bp, Homo sapiens
ccacatgagtgtcttact

SEQ ID NO: 3851 - DNA, 19 bp, Homo sapiens
acatgctggtactttttag

SEQ ID NO: 3852 - DNA, 28 bp, Homo sapiens
ccacatgaggccatttagctaaaaagta

SEQ ID NO: 3853 - DNA, 21 bp, Homo sapiens
acctatgatgccttttcttag

SEQ ID NO: 3854 - DNA, 25 bp, Homo sapiens
catgatgccttgaagctaaaaagta

SEQ ID NO: 3855 - DNA, 76 bp, Lumpy skin disease virus
ctgtttctgattcagattccccttggctaaaagttgcatcaattaatagtggaggttgccctgtagtcacggacag

SEQ ID NO: 3856 - DNA, 24 bp, Lumpy skin disease virus
ttaatagtggaggttgccctgtag

SEQ ID NO: 3857 - DNA, 24 bp, Lumpy skin disease virus
tctgattcagattccccttggcta

SEQ ID NO: 3858 - DNA, 21 bp, Homo sapiens
taagtggtttctgtcctgtag

SEQ ID NO: 3859 - DNA, 74 bp, Lumpy skin disease virus
cggccgtgtgcgcaggttactacgtgggggactcactctttgttggtactccaaacgtgacctcgtactggttg

SEQ ID NO: 3860 - DNA, 24 bp, Lumpy skin disease virus
gtactccaaacgtgacctcgtact

SEQ ID NO: 3861 - DNA, 24 bp, Lumpy skin disease virus
gccgtgtgcgcaggttactacgtg

SEQ ID NO: 3862 - DNA, 15 bp, Homo sapiens
ctcctgacctcgtac

SEQ ID NO: 3863 - DNA, 83 bp, Lumpy skin disease virus
gggcgctaaacctctgagacccgttgatttggctatcaccccttgggatgaccccaaatgtgagtttctggtgacacacgcct

SEQ ID NO: 3864 - DNA, 24 bp, Lumpy skin disease virus
tgatttggctatcaccccttggga

SEQ ID NO: 3865 - DNA, 24 bp, Lumpy skin disease virus
tgaccccaaatgtgagtttctggt

SEQ ID NO: 3866 - DNA, 24 bp, Homo sapiens
tgatttcaaccccattccttggga

SEQ ID NO: 3867 - DNA, 16 bp, Homo sapiens
taatttggccttttgg

SEQ ID NO: 3868 - DNA, 19 bp, Homo sapiens
tgatttggttatcagtggg

SEQ ID NO: 3869 - DNA, 67 bp, Lumpy skin disease virus
agatatcatgggaggcgctgggagaaagtctcccagaaagtctcccagaaagtctcccagaaagtct

SEQ ID NO: 3870 - DNA, 24 bp, Lumpy skin disease virus
tcccagaaagtctcccagaaagtc

SEQ ID NO: 3871 - DNA, 24 bp, Lumpy skin disease virus
tatcatgggaggcgctgggagaaa

SEQ ID NO: 3872 - DNA, 22 bp, Homo sapiens
tattatggaaggccattagaaa

SEQ ID NO: 3873 - DNA, 22 bp, Homo sapiens
catcatgggaaagtgggggaga

SEQ ID NO: 3874 - DNA, 25 bp, Homo sapiens
taccatgggaagttcttggggggag

SEQ ID NO: 3875 - DNA, 16 bp, Homo sapiens
tcataggaggtggaga

SEQ ID NO: 3876 - DNA, 18 bp, Homo sapiens
tcctgggaggctgcaggg

SEQ ID NO: 3877 - DNA, 18 bp, Homo sapiens
tatcatgtgagggaggaa

SEQ ID NO: 3878 - DNA, 22 bp, Homo sapiens
tattatgggagataccaagaaa

SEQ ID NO: 3879 - DNA, 16 bp, Homo sapiens
catggggcagggagaa

SEQ ID NO: 3880 - DNA, 19 bp, Homo sapiens
tgggaggctgaagtgggag

SEQ ID NO: 3881 - DNA, 18 bp, Homo sapiens
tctggggggcaaaagaaa

SEQ ID NO: 3882 - DNA, 15 bp, Homo sapiens
catgggaggagggaa

SEQ ID NO: 3883 - DNA, 20 bp, Homo sapiens
actctaggtgctgggggaaa

SEQ ID NO: 3884 - DNA, 17 bp, Homo sapiens
acgtgggcttgggagaa

SEQ ID NO: 3885 - DNA, 15 bp, Homo sapiens
catgggaggtgggag

SEQ ID NO: 3886 - DNA, 22 bp, Homo sapiens
tcatgggagctctgtgggggag

SEQ ID NO: 3887 - DNA, 17 bp, Homo sapiens
atggctccactgggaga

SEQ ID NO: 3888 - DNA, 17 bp, Homo sapiens
tcatggggcctgggaga

SEQ ID NO: 3889 - DNA, 20 bp, Homo sapiens
tcatgggagggtgggggaaa

SEQ ID NO: 3890 - DNA, 114 bp, Lumpy skin disease virus
atgtgctacctgccgacagtgttgtcaaggttggtgtcagcaagcctggggtcgctcacaaagcactctgtacggtaactgatatctacctcccgatgctgggcttgtacacat

SEQ ID NO: 3891 - DNA, 24 bp, Lumpy skin disease virus
tctgtacggtaactgatatctacc

SEQ ID NO: 3892 - DNA, 24 bp, Lumpy skin disease virus
gacagtgttgtcaaggttggtgtc

SEQ ID NO: 3893 - DNA, 20 bp, Homo sapiens
tctgtacagatagatatcta

SEQ ID NO: 3894 - DNA, 19 bp, Homo sapiens
tctgtacagtgacatttac

SEQ ID NO: 3895 - DNA, 21 bp, Homo sapiens
tctgtacaggttgtgtctgcc

SEQ ID NO: 3896 - DNA, 126 bp, Gallid herpesvirus 3
cttttttacgactccatcagaaagaggtttaatatttttgtgagaccatcgaagagagaaagataaaacttttttacgactccatcagaaagaggtttaatatttttgtgagaccatcgaagagag

SEQ ID NO: 3897 - DNA, 24 bp, Encephalomyocarditis virus
catcagaaagaggtttaatatttt

SEQ ID NO: 3898 - DNA, 24 bp, Encephalomyocarditis virus
tccatcagaaagaggtttaatatt

SEQ ID NO: 3899 - DNA, 22 bp, Homo sapiens
tcagaaaataagctagtatttt

SEQ ID NO: 3900 - DNA, 19 bp, Homo sapiens
agaaagcattcaatatttt

SEQ ID NO: 3901 - DNA, 20 bp, Homo sapiens
ccagaaagatgtagtatttt

SEQ ID NO: 3902 - DNA, 19 bp, Homo sapiens
gaaagaggttttcaatttt

SEQ ID NO: 3903 - DNA, 98 bp, Gallid herpesvirus 3
taaaattaaattaattataaaattatgtatatgatttactaactttagttagataagttagtaatacataaattttagtatattaatattatatttta

SEQ ID NO: 3904 - DNA, 24 bp, Gallid herpesvirus 3
taagttagtaatacataaatttta

SEQ ID NO: 3905 - DNA, 24 bp, Gallid herpesvirus 3
tataaaattatgtatatgatttac

SEQ ID NO: 3906 - DNA, 24 bp, Homo sapiens
taagtctaaaacacatagatttta

SEQ ID NO: 3907 - DNA, 73 bp, Gallid herpesvirus 3
ttacctgcagcctaaccctagccctaaccctagctcatgcttggagtgtgttggtgacagtccttgcaggtga

SEQ ID NO: 3908 - DNA, 24 bp, Gallid herpesvirus 3
tgtgttggtgacagtccttgcagg

SEQ ID NO: 3909 - DNA, 24 bp, Gallid herpesvirus 3
cctgcagcctaaccctagccctaa

SEQ ID NO: 3910 - DNA, 19 bp, Homo sapiens
cagcccaggccctggccct

SEQ ID NO: 3911 - DNA, 21 bp, Homo sapiens
ccttggtctccttccagccct

SEQ ID NO: 3912 - DNA, 19 bp, Homo sapiens
cctgaagccccttggctct

SEQ ID NO: 3913 - DNA, 18 bp, Homo sapiens
cctgcagcccagtcctgc

SEQ ID NO: 3914 - DNA, 15 bp, Homo sapiens
cctccacaccctagc

SEQ ID NO: 3915 - DNA, 18 bp, Homo sapiens
cctgcagcccaatccact

SEQ ID NO: 3916 - DNA, 24 bp, Homo sapiens
cctgcagcctgcctcttttctgcc

SEQ ID NO: 3917 - DNA, 16 bp, Homo sapiens
ctgcagccttagccct

SEQ ID NO: 3918 - DNA, 17 bp, Homo sapiens
ctgtgcttccagcccta

SEQ ID NO: 3919 - DNA, 19 bp, Homo sapiens
ctgcagccgggtaacctag

SEQ ID NO: 3920 - DNA, 20 bp, Homo sapiens
ctgggctcatctagccctaa

SEQ ID NO: 3921 - DNA, 19 bp, Homo sapiens
cctgcagcctgctcctcgc

SEQ ID NO: 3922 - DNA, 20 bp, Homo sapiens
ctgcagcctcatacctctaa

SEQ ID NO: 3923 - DNA, 20 bp, Homo sapiens
ctggtggcctaaccaggacc

SEQ ID NO: 3924 - DNA, 15 bp, Homo sapiens
cctgcagccagcact

SEQ ID NO: 3925 - DNA, 21 bp, Homo sapiens
cctacagcttggtaagtccta

SEQ ID NO: 3926 - DNA, 17 bp, Homo sapiens
cctgcaacctacaagcc

SEQ ID NO: 3927 - DNA, 18 bp, Homo sapiens
cctgcagccctagttcta

SEQ ID NO: 3928 - DNA, 19 bp, Homo sapiens
tgcagcctaccttgtagcc

SEQ ID NO: 3929 - DNA, 19 bp, Homo sapiens
tgtggctagggccagccct

SEQ ID NO: 3930 - DNA, 20 bp, Homo sapiens
cctccggcgggcctagccct

SEQ ID NO: 3931 - DNA, 20 bp, Homo sapiens
ctttagcctaacttgcacct

SEQ ID NO: 3932 - DNA, 16 bp, Homo sapiens
tacagcctggcaccta

SEQ ID NO: 3933 - DNA, 25 bp, Homo sapiens
cctccagagccctaaccctagccct

SEQ ID NO: 3934 - DNA, 15 bp, Homo sapiens
cagcctaacccccta

SEQ ID NO: 3935 - DNA, 22 bp, Homo sapiens
ctgcagcctagcaccctcctaa

SEQ ID NO: 3936 - DNA, 18 bp, Homo sapiens
ctgcagccttgaactcct

SEQ ID NO: 3937 - DNA, 19 bp, Homo sapiens
cctgcagcttcgaactcct

SEQ ID NO: 3938 - DNA, 23 bp, Homo sapiens
cctcagcttggcctcgtctcccc

SEQ ID NO: 3939 - DNA, 68 bp, Gallid herpesvirus 3
ggaaatagcctttggattatgcctttgatagtgcctcaggctacaagatcaatccaacggttgtttcc

SEQ ID NO: 3940 - DNA, 24 bp, Gallid herpesvirus 3
caagatcaatccaacggttgtttc

SEQ ID NO: 3941 - DNA, 24 bp, Gallid herpesvirus 3
agcctttggattatgcctttgata

SEQ ID NO: 3942 - DNA, 21 bp, Homo sapiens
tgagatcaaatctggtcatct

SEQ ID NO: 3943 - DNA, 23 bp, Homo sapiens
caagattaagtctgggttatttc

SEQ ID NO: 3944 - DNA, 17 bp, Homo sapiens
tgagatcaatcttggct

SEQ ID NO: 3945 - DNA, 19 bp, Homo sapiens
ttcaaacatgtctttgata

SEQ ID NO: 3946 - DNA, 23 bp, Homo sapiens
agtccttggattatgtaccactg

SEQ ID NO: 3947 - DNA, 15 bp, Homo sapiens
tttggcacctttgat

SEQ ID NO: 3948 - DNA, 23 bp, Homo sapiens
agcctttgggttttaagactgat

SEQ ID NO: 3949 - DNA, 61 bp, Gallid herpesvirus 3
atggattttactagatcatttatataccaaaaaatattatacgatctacgttttattatat

SEQ ID NO: 3950 - DNA, 24 bp, Gallid herpesvirus 3
tactagatcatttatataccaaaa

SEQ ID NO: 3951 - DNA, 22 bp, Gallid herpesvirus 3
tacgatctacgttttattatat

SEQ ID NO: 3952 - DNA, 21 bp, Homo sapiens
tagcattgccacataccaaaa

SEQ ID NO: 3953 - DNA, 17 bp, Homo sapiens
ccagatcaaaaatacca

SEQ ID NO: 3954 - DNA, 15 bp, Homo sapiens
agactatataccaaa

SEQ ID NO: 3955 - DNA, 17 bp, Homo sapiens
ctagtcatttacttcca

SEQ ID NO: 3956 - DNA, 20 bp, Homo sapiens
taaatcattttcacagacca

SEQ ID NO: 3957 - DNA, 128 bp, Gallid herpesvirus 3
cttttttacgactccatcagaaagaggtttaatatttttgtgagaccatcgaagagagaaagagataaaacttttttacgactccatcagaaagaggtttaatatttttgtgagaccatcgaagagag

SEQ ID NO: 3958 - DNA, 77 bp, Gallid herpesvirus 3
ccacctgcccgcccgcccgcccacctgacccgcgcagaggtaagggagcgagctgttgagttggattggcagagtgg

SEQ ID NO: 3959 - DNA, 24 bp, Gallid herpesvirus 3
agggagcgagctgttgagttggat

SEQ ID NO: 3960 - DNA, 24 bp, Gallid herpesvirus 3
gcccgcccgcccgcccacctgacc

SEQ ID NO: 3961 - DNA, 20 bp, Homo sapiens
gggtgcgagctggtatggat

SEQ ID NO: 3962 - DNA, 21 bp, Homo sapiens
aggaggtgagctaggggttgg

SEQ ID NO: 3963 - DNA, 19 bp, Homo sapiens
gggggctgagctgaggtgg

SEQ ID NO: 3964 - DNA, 22 bp, Homo sapiens
agggagcagggctgtccgggat

SEQ ID NO: 3965 - DNA, 22 bp, Homo sapiens
gccctgcctgctccacctgacc

SEQ ID NO: 3966 - DNA, 20 bp, Homo sapiens
ccgcccgcccgcgcgcgctg

SEQ ID NO: 3967 - DNA, 22 bp, Homo sapiens
gcctctcgctcgcccaccagcc

SEQ ID NO: 3968 - DNA, 18 bp, Homo sapiens
gcccgccgcgctcctgac

SEQ ID NO: 3969 - DNA, 15 bp, Homo sapiens
cccgcccgcccagac

SEQ ID NO: 3970 - DNA, 20 bp, Homo sapiens
gcccgcgcgcccgcccgtct

SEQ ID NO: 3971 - DNA, 19 bp, Homo sapiens
gctgcccgcccacctggcc

SEQ ID NO: 3972 - DNA, 22 bp, Homo sapiens
gcccgccccctgctcgtctgcc

SEQ ID NO: 3973 - DNA, 22 bp, Homo sapiens
ccctgctcgtctgcccgctgcc

SEQ ID NO: 3974 - DNA, 21 bp, Homo sapiens
gcccgcccgcccgcagggacc

SEQ ID NO: 3975 - DNA, 17 bp, Homo sapiens
gcccgcccgccgctcac

SEQ ID NO: 3976 - DNA, 17 bp, Homo sapiens
gcccgcccgccgccgcc

SEQ ID NO: 3977 - DNA, 17 bp, Homo sapiens
gccccccgcccgccccc

SEQ ID NO: 3978 - DNA, 24 bp, Homo sapiens
gcccactctgcagcccacctggcc

SEQ ID NO: 3979 - DNA, 23 bp, Homo sapiens
gcccgccccgcccgttccccgcc

SEQ ID NO: 3980 - DNA, 19 bp, Homo sapiens
gcccgttccccgcccggcc

SEQ ID NO: 3981 - DNA, 18 bp, Homo sapiens
gcccgcctgcctggcgcc

SEQ ID NO: 3982 - DNA, 18 bp, Homo sapiens
ccgcctgcccgcccagct

SEQ ID NO: 3983 - DNA, 24 bp, Homo sapiens
gcccacccgctcgcctgccacacc

SEQ ID NO: 3984 - DNA, 20 bp, Homo sapiens
gcccgcctggcccgtccgcc

SEQ ID NO: 3985 - DNA, 20 bp, Homo sapiens
gcctggcccgtccgccgacc

SEQ ID NO: 3986 - DNA, 20 bp, Homo sapiens
gcccgcctgctgccagagcc

SEQ ID NO: 3987 - DNA, 18 bp, Homo sapiens
cctcgcccgccgccgacc

SEQ ID NO: 3988 - DNA, 19 bp, Homo sapiens
gcccgctcgcccgaccgcc

SEQ ID NO: 3989 - DNA, 18 bp, Homo sapiens
ccgcccgctcgcccgacc

SEQ ID NO: 3990 - DNA, 17 bp, Homo sapiens
gcccgccgcccgccgcc

SEQ ID NO: 3991 - DNA, 18 bp, Homo sapiens
gcccgcccgccgcccgcc

SEQ ID NO: 3992 - DNA, 19 bp, Homo sapiens
cccgcccgcccgcccggcc

SEQ ID NO: 3993 - DNA, 21 bp, Homo sapiens
acccgcccgcccgcctgcgcc

SEQ ID NO: 3994 - DNA, 19 bp, Homo sapiens
gcccaccccaccatctgac

SEQ ID NO: 3995 - DNA, 17 bp, Homo sapiens
gcccgcccgccgcctcc

SEQ ID NO: 3996 - DNA, 19 bp, Homo sapiens
gcccccccaggcccacctg

SEQ ID NO: 3997 - DNA, 18 bp, Homo sapiens
acccgcctgcctgtccac

SEQ ID NO: 3998 - DNA, 16 bp, Homo sapiens
gcacgcccgcctgcga

SEQ ID NO: 3999 - DNA, 18 bp, Homo sapiens
gccagcttgcccgccccc

SEQ ID NO: 4000 - DNA, 19 bp, Homo sapiens
gcccgcccgtccgaccgcc

SEQ ID NO: 4001 - DNA, 23 bp, Homo sapiens
gcctgcccgccctgcctgcagcc

SEQ ID NO: 4002 - DNA, 19 bp, Homo sapiens
gcccgcctgcttgcccgcc

SEQ ID NO: 4003 - DNA, 20 bp, Homo sapiens
gcccgcctgcttgcccgcct

SEQ ID NO: 4004 - DNA, 21 bp, Homo sapiens
gcccgctcgtccctgctgacc

SEQ ID NO: 4005 - DNA, 21 bp, Homo sapiens
gcccgccctcccgcctccgcc

SEQ ID NO: 4006 - DNA, 22 bp, Homo sapiens
cccgcccgcctcggctctggcc

SEQ ID NO: 4007 - DNA, 19 bp, Homo sapiens
gccctcccgcccgcccgcc

SEQ ID NO: 4008 - DNA, 17 bp, Homo sapiens
gcccgcccgccctccga

SEQ ID NO: 4009 - DNA, 20 bp, Homo sapiens
gcgcgcccgcccgccccgct

SEQ ID NO: 4010 - DNA, 18 bp, Homo sapiens
gcccgcccgccccgctcc

SEQ ID NO: 4011 - DNA, 16 bp, Homo sapiens
gcccacctgcccgcga

SEQ ID NO: 4012 - DNA, 20 bp, Homo sapiens
gcccgctcgcccgccgtgcc

SEQ ID NO: 4013 - DNA, 21 bp, Homo sapiens
gcccgcccgccggcccgcgcc

SEQ ID NO: 4014 - DNA, 22 bp, Homo sapiens
gcccgcccgccctccccaggcc

SEQ ID NO: 4015 - DNA, 21 bp, Homo sapiens
gctcgcccaccccttctgacc

SEQ ID NO: 4016 - DNA, 19 bp, Homo sapiens
gctcgcccgcccgcccgcc

SEQ ID NO: 4017 - DNA, 19 bp, Homo sapiens
gcccgcccgcccgccggcc

SEQ ID NO: 4018 - DNA, 19 bp, Homo sapiens
gcccgctcgcccgccagcc

SEQ ID NO: 4019 - DNA, 25 bp, Homo sapiens
gctcgcccgccagccccgcggaacc

SEQ ID NO: 4020 - DNA, 22 bp, Homo sapiens
gctccgcccgcctgtcaaggcc

SEQ ID NO: 4021 - DNA, 18 bp, Homo sapiens
cccgcccaacccacctga

SEQ ID NO: 4022 - DNA, 25 bp, Homo sapiens
gcccgcctcgtccgcccgcccgacc

SEQ ID NO: 4023 - DNA, 19 bp, Homo sapiens
gcccgctcgctccctctgc

SEQ ID NO: 4024 - DNA, 18 bp, Homo sapiens
ccgcccacctggcctgac

SEQ ID NO: 4025 - DNA, 24 bp, Homo sapiens
gcccttttgtccgcccacctggcc

SEQ ID NO: 4026 - DNA, 19 bp, Homo sapiens
gcccgctcgcgccgccgcc

SEQ ID NO: 4027 - DNA, 21 bp, Homo sapiens
gcccgcgcgcccgcctccgcc

SEQ ID NO: 4028 - DNA, 18 bp, Homo sapiens
gctcgcccgccccctcac

SEQ ID NO: 4029 - DNA, 20 bp, Homo sapiens
gccagcctctgcccacctga

SEQ ID NO: 4030 - DNA, 18 bp, Homo sapiens
gcccgctgcccgccggcc

SEQ ID NO: 4031 - DNA, 21 bp, Homo sapiens
gcccgcccgcgcgcggagacc

SEQ ID NO: 4032 - DNA, 20 bp, Homo sapiens
gctcggccgcccgctcggac

SEQ ID NO: 4033 - DNA, 17 bp, Homo sapiens
gcccgcccctcccctgc

SEQ ID NO: 4034 - DNA, 19 bp, Homo sapiens
gcccgccggcctgcccgcc

SEQ ID NO: 4035 - DNA, 19 bp, Homo sapiens
gcctgcccgccccctccgc

SEQ ID NO: 4036 - DNA, 18 bp, Homo sapiens
gccggcctgcccgccccc

SEQ ID NO: 4037 - DNA, 20 bp, Homo sapiens
ccgcccgctcgtccgcagcc

SEQ ID NO: 4038 - DNA, 19 bp, Homo sapiens
gcccgtccttctgcccacc

SEQ ID NO: 4039 - DNA, 18 bp, Homo sapiens
gcccacccgcctgttcct

SEQ ID NO: 4040 - DNA, 20 bp, Homo sapiens
gcccgcccgttagccccgcc

SEQ ID NO: 4041 - DNA, 21 bp, Homo sapiens
gcccgcccgcttgcccgcccg

SEQ ID NO: 4042 - DNA, 19 bp, Homo sapiens
gcccgcccgcttgcccgcc

SEQ ID NO: 4043 - DNA, 20 bp, Homo sapiens
gcccgcctgttcccccggcc

SEQ ID NO: 4044 - DNA, 21 bp, Homo sapiens
gccggtccgcccgcctcagcc

SEQ ID NO: 4045 - DNA, 17 bp, Homo sapiens
gcccgctcgctccctcc

SEQ ID NO: 4046 - DNA, 18 bp, Homo sapiens
gcccgcccgcccgttgcc

SEQ ID NO: 4047 - DNA, 20 bp, Homo sapiens
gctcgctcgcccgccgggcc

SEQ ID NO: 4048 - DNA, 21 bp, Homo sapiens
gcctgctgcccgctctgcgcc

SEQ ID NO: 4049 - DNA, 20 bp, Homo sapiens
gcccgcccgctcctcacgcc

SEQ ID NO: 4050 - DNA, 19 bp, Homo sapiens
gccctggcaggcccacctg

SEQ ID NO: 4051 - DNA, 21 bp, Homo sapiens
gcgcgcccgcccgccggagac

SEQ ID NO: 4052 - DNA, 23 bp, Homo sapiens
gcccgcccggccgctcgcgcgcc

SEQ ID NO: 4053 - DNA, 22 bp, Homo sapiens
gcccgcccgcccgcgcgcagcc

SEQ ID NO: 4054 - DNA, 70 bp, Gallid herpesvirus 3
ataaaaatatttttgtaaaactttttttatgagaccatcaaagagagaaagagaataaaaatatttttgt

SEQ ID NO: 4055 - DNA, 24 bp, Gallid herpesvirus 3
aatatttttgtaaaacttttttta

SEQ ID NO: 4056 - DNA, 24 bp, Gallid herpesvirus 3
aaagagagaaagagaataaaaata

SEQ ID NO: 4057 - DNA, 19 bp, Homo sapiens
tatttctgtaacttttttt

SEQ ID NO: 4058 - DNA, 72 bp, Gallid herpesvirus 3
gtggaggagagagagaaataagcacctttaccttttttggggataaaggtgaatctctactctcgctctcac

SEQ ID NO: 4059 - DNA, 24 bp, Gallid herpesvirus 3
gaggagagagagaaataagcacct

SEQ ID NO: 4060 - DNA, 24 bp, Gallid herpesvirus 3
gataaaggtgaatctctactctcg

SEQ ID NO: 4061 - DNA, 18 bp, Homo sapiens
gataaagggaattaaact

SEQ ID NO: 4062 - DNA, 131 bp, Variola virus
cccccgactccaacctcattcaaaatcccgcttgagttccgtaggggaagtgagtctggcgatttgagagacccctcgcttctcccagaactctagaccggtgttttgaagaatcttcgagagtctggggg

SEQ ID NO: 4063 - DNA, 24 bp, Variola virus
tcccagaactctagaccggtgttt

SEQ ID NO: 4064 - DNA, 24 bp, Variola virus
aggggaagtgagtctggcgatttg

SEQ ID NO: 4065 - DNA, 17 bp, Homo sapiens
ccccagggaccggtgtt

SEQ ID NO: 4066 - DNA, 21 bp, Homo sapiens
tctcagggtttagaccaacat

SEQ ID NO: 4067 - DNA, 18 bp, Homo sapiens
ccagcactttagaaaagt

SEQ ID NO: 4068 - DNA, 115 bp, Variola virus
gatggtctcataaaaaaagttttacaaaaatatttttattctctttctctctttgatggtctcataaaaaaagttttacaaaaatatttttattctctttctctctttgatggtc

SEQ ID NO: 4069 - DNA, 24 bp, Variola virus
ataaaaaaagttttacaaaaatat

SEQ ID NO: 4070 - DNA, 24 bp, Equine herpesvirus 1
tacaaaaatatttttattctcttt

SEQ ID NO: 4071 - DNA, 21 bp, Homo sapiens
aaaaagcagccacaaaaatat

SEQ ID NO: 4072 - DNA, 21 bp, Homo sapiens
aaaaaagccttataaaaatat

SEQ ID NO: 4073 - DNA, 71 bp, Variola virus
cgcgttagtggtccgtgggaagctaagttggccattggagacacctagcttgcacagaccactaccacgcg

SEQ ID NO: 4074 - DNA, 24 bp, Variola virus
ttagtggtccgtgggaagctaagt

SEQ ID NO: 4075 - DNA, 22 bp, Variola virus
ttgcacagaccactaccacgcg

SEQ ID NO: 4076 - DNA, 24 bp, Homo sapiens
tagtggtcagtccaggagctaggt

SEQ ID NO: 4077 - DNA, 18 bp, Homo sapiens
ttagggacgggagctaag

SEQ ID NO: 4078 - DNA, 84 bp, Variola virus
gaaatgccgcgtgatatccctatggttcagttggttgttatgtaaaagagaccagctttccaggggatacacacacggcgtttt

SEQ ID NO: 4079 - DNA, 24 bp, Variola virus
tatccctatggttcagttggttgt

SEQ ID NO: 4080 - DNA, 24 bp, Variola virus
tccaggggatacacacacggcgtt

SEQ ID NO: 4081 - DNA, 19 bp, Homo sapiens
tgtgtctttagttggttgt

SEQ ID NO: 4082 - DNA, 18 bp, Homo sapiens
ctcgagctggttggttgt

SEQ ID NO: 4083 - DNA, 83 bp, Variola virus
gatgctgtgggacagcgcatagagtgtctgagttctggtaatggagggatctccaggcactctatgcactgcttcgcagcgtc

SEQ ID NO: 4084 - DNA, 24 bp, Variola virus
cactctatgcactgcttcgcagcg

SEQ ID NO: 4085 - DNA, 24 bp, Variola virus
gcgcatagagtgtctgagttctgg

SEQ ID NO: 4086 - DNA, 20 bp, Homo sapiens
ctctgtgtcctgcctcggcg

SEQ ID NO: 4087 - DNA, 18 bp, Homo sapiens
tatgcgcggatcgcagcg

SEQ ID NO: 4088 - DNA, 85 bp, Variola virus
gcaagatcccgcatgagtccctctgagccgttagttgtgatatacttatcactaactagcttagagagtctctcacggtgtctgc

SEQ ID NO: 4089 - DNA, 24 bp, Variola virus
tagcttagagagtctctcacggtg

SEQ ID NO: 4090 - DNA, 24 bp, Variola virus
tccctctgagccgttagttgtgat

SEQ ID NO: 4091 - DNA, 21 bp, Homo sapiens
tctctctgagctgtcaaccat

SEQ ID NO: 4092 - DNA, 16 bp, Homo sapiens
ctctgacctgctgtga

SEQ ID NO: 4093 - DNA, 67 bp, Cowpox virus
gcgcgtcgtgtactgtaacatgtccaaattacaggaaaaggactacatcaacgtacgaaagatgtgc

SEQ ID NO: 4094 - DNA, 24 bp, Cowpox virus
actacatcaacgtacgaaagatgt

SEQ ID NO: 4095 - DNA, 24 bp, Cowpox virus
gtgtactgtaacatgtccaaatta

SEQ ID NO: 4096 - DNA, 21 bp, Homo sapiens
gtatactgtagtgtttgcaaa

SEQ ID NO: 4097 - DNA, 71 bp, Cowpox virus
ccacgccgaaaagatgtccaggctcgtcaagatgggacccttttccgccggatctctcacaatctgcgtgg

SEQ ID NO: 4098 - DNA, 19 bp, Cowpox virus
tctctcacaatctgcgtgg

SEQ ID NO: 4099 - DNA, 24 bp, Cowpox virus
ccgaaaagatgtccaggctcgtca

SEQ ID NO: 4100 - DNA, 20 bp, Homo sapiens
tctctcacgtgcttcagtgg

SEQ ID NO: 4101 - DNA, 16 bp, Homo sapiens
tctctcacagtcctgg

SEQ ID NO: 4102 - DNA, 18 bp, Homo sapiens
tctcccacagtctcacag

SEQ ID NO: 4103 - DNA, 17 bp, Homo sapiens
tctcttcccctgcgtgg

SEQ ID NO: 4104 - DNA, 15 bp, Homo sapiens
tcttcacctgcgtgg

SEQ ID NO: 4105 - DNA, 21 bp, Homo sapiens
cctctcatggtccacaactgg

SEQ ID NO: 4106 - DNA, 20 bp, Homo sapiens
tctctcacagaggctgttgg

SEQ ID NO: 4107 - DNA, 16 bp, Homo sapiens
tctcccacctccgtgg

SEQ ID NO: 4108 - DNA, 20 bp, Homo sapiens
tctctcacaattaaaaatgg

SEQ ID NO: 4109 - DNA, 14 bp, Homo sapiens
tctcttctgcgtag

SEQ ID NO: 4110 - DNA, 18 bp, Homo sapiens
tctcatacaatctgaagg

SEQ ID NO: 4111 - DNA, 19 bp, Homo sapiens
tcttgccagttctgcgtgg

SEQ ID NO: 4112 - DNA, 17 bp, Homo sapiens
tccctggtcctgcgtgg

SEQ ID NO: 4113 - DNA, 17 bp, Homo sapiens
tctctaacaatctgtgg

SEQ ID NO: 4114 - DNA, 15 bp, Homo sapiens
cccctctctgcgtgg

SEQ ID NO: 4115 - DNA, 16 bp, Homo sapiens
tccctcacatgggtgg

SEQ ID NO: 4116 - DNA, 18 bp, Homo sapiens
tctcccactccattgtgg

SEQ ID NO: 4117 - DNA, 18 bp, Homo sapiens
tctctgccagctgcgtgg

SEQ ID NO: 4118 - DNA, 19 bp, Homo sapiens
gaaaaaatgtccaggaggt

SEQ ID NO: 4119 - DNA, 18 bp, Homo sapiens
gaaaagatagtctgcagg

SEQ ID NO: 4120 - DNA, 19 bp, Homo sapiens
aaaatgtccatcagtgtca

SEQ ID NO: 4121 - DNA, 20 bp, Homo sapiens
cctgggaggtgtccaggacc

SEQ ID NO: 4122 - DNA, 22 bp, Homo sapiens
ccaaaccatcccgggctcgtca

SEQ ID NO: 4123 - DNA, 16 bp, Homo sapiens
aaaagatgtccgctca

SEQ ID NO: 4124 - DNA, 20 bp, Homo sapiens
gaaaagatgattagacaagt

SEQ ID NO: 4125 - DNA, 24 bp, Homo sapiens
cctgggagaaacccaggcttgtca

SEQ ID NO: 4126 - DNA, 75 bp, Cowpox virus
ctgcccgacctaaagtccttcaaggccaagtgcaatgtgacgctgaggctcatgggggacccagagtgcgggcag

SEQ ID NO: 4127 - DNA, 24 bp, Cowpox virus
tcatgggggacccagagtgcgggc

SEQ ID NO: 4128 - DNA, 24 bp, Cowpox virus
tccttcaaggccaagtgcaatgtg

SEQ ID NO: 4129 - DNA, 25 bp, Homo sapiens
tctcttgaggccaagccactctgtg

SEQ ID NO: 4130 - DNA, 21 bp, Homo sapiens
tccttcaagttaagatttgtg

SEQ ID NO: 4131 - DNA, 19 bp, Homo sapiens
ttcaaggctgggcgccgtg

SEQ ID NO: 4132 - DNA, 19 bp, Homo sapiens
caaaagcaagtgcaatgtg

SEQ ID NO: 4133 - DNA, 61 bp, Cowpox virus
gtgtgtgctggatttctgcaatgtggccatggaacaggggcagatcctccccgccgaacac

SEQ ID NO: 4134 - DNA, 24 bp, Cowpox virus
aggggcagatcctccccgccgaac

SEQ ID NO: 4135 - DNA, 24 bp, Cowpox virus
tgctggatttctgcaatgtggcca

SEQ ID NO: 4136 - DNA, 21 bp, Homo sapiens
tgttggctttctgcagagatg

SEQ ID NO: 4137 - DNA, 17 bp, Homo sapiens
tgctggattctgtgagg

SEQ ID NO: 4138 - DNA, 21 bp, Homo sapiens
gctggagcagcagtgtggcca

SEQ ID NO: 4139 - DNA, 18 bp, Homo sapiens
tgttggatttcttcagca

SEQ ID NO: 4140 - DNA, 23 bp, Homo sapiens
tgctgaatttctgtgaacagcca

SEQ ID NO: 4141 - DNA, 20 bp, Homo sapiens
tactggatttctgtggagtg

SEQ ID NO: 4142 - DNA, 19 bp, Homo sapiens
tgctggatttcttactcgc

SEQ ID NO: 4143 - DNA, 21 bp, Homo sapiens
tactggagagcagtgtggcca

SEQ ID NO: 4144 - DNA, 18 bp, Homo sapiens
tgttggtttctgcactcc

SEQ ID NO: 4145 - DNA, 19 bp, Homo sapiens
gctgggtttctgcaatctg

SEQ ID NO: 4146 - DNA, 18 bp, Homo sapiens
tgtggggctgatgtggcc

SEQ ID NO: 4147 - DNA, 25 bp, Homo sapiens
ctggatttcagtaaggcaatgtggc

SEQ ID NO: 4148 - DNA, 68 bp, Cowpox virus
ggacgcgtctagtatctacgtctcacctctgaatagtctagagacgccaaatactttaagacggatcc

SEQ ID NO: 4149 - DNA, 24 bp, Cowpox virus
tctagtatctacgtctcacctctg

SEQ ID NO: 4150 - DNA, 24 bp, Cowpox virus
tctagagacgccaaatactttaag

SEQ ID NO: 4151 - DNA, 19 bp, Homo sapiens
cagaaatgacaaatacttt

SEQ ID NO: 4152 - DNA, 19 bp, Homo sapiens
tctaagacgccagctcttt

SEQ ID NO: 4153 - DNA, 65 bp, Cowpox virus
gcgggagctgggatcctggaggacagagccaggtcaggcgtcctcttggcggtcaggtctcccgt

SEQ ID NO: 4154 - DNA, 24 bp, Cowpox virus
tgggatcctggaggacagagccag

SEQ ID NO: 4155 - DNA, 24 bp, Cowpox virus
cgtcctcttggcggtcaggtctcc

SEQ ID NO: 4156 - DNA, 24 bp, Homo sapiens
gtcctctctggaccaagggtttcc

SEQ ID NO: 4157 - DNA, 22 bp, Homo sapiens
gccctcttccttctgggtttcc

SEQ ID NO: 4158 - DNA, 17 bp, Homo sapiens
tcttttggtcaagtttc

SEQ ID NO: 4159 - DNA, 22 bp, Homo sapiens
gtcttctggaacataggtctcc

SEQ ID NO: 4160 - DNA, 20 bp, Homo sapiens
gcctcttggcgaacattctc

SEQ ID NO: 4161 - DNA, 22 bp, Homo sapiens
cgtttcttggcattgagggtct

SEQ ID NO: 4162 - DNA, 22 bp, Homo sapiens
gttgtcttggcaagcagtttcc

SEQ ID NO: 4163 - DNA, 23 bp, Homo sapiens
gtcctcgtggtggtgattgatct

SEQ ID NO: 4164 - DNA, 19 bp, Homo sapiens
cgtcctctgtcggggtctc

SEQ ID NO: 4165 - DNA, 21 bp, Homo sapiens
gtctttaggcaggtcaggtct

SEQ ID NO: 4166 - DNA, 20 bp, Homo sapiens
gttctcttggctactgtctc

SEQ ID NO: 4167 - DNA, 20 bp, Homo sapiens
tcctttttaaaacaggtctc

SEQ ID NO: 4168 - DNA, 81 bp, Ectromelia virus
tttttgaacaatacgcactggtaatatccgtgatcccgtgtggaagagagaggatataataaatcgtgtgtatctcaaaaa

SEQ ID NO: 4169 - DNA, 24 bp, Ectromelia virus
tataataaatcgtgtgtatctcaa

SEQ ID NO: 4170 - DNA, 24 bp, Ectromelia virus
tggtaatatccgtgatcccgtgtg

SEQ ID NO: 4171 - DNA, 18 bp, Homo sapiens
tataataagtcctgtgta

SEQ ID NO: 4172 - DNA, 62 bp, Ectromelia virus
ggctctctgcggctcgcgttcgcgttccccggtgacgaaacccgcgcacaccgcagaacgcc

SEQ ID NO: 4173 - DNA, 24 bp, Ectromelia virus
tctctgcggctcgcgttcgcgttc

SEQ ID NO: 4174 - DNA, 17 bp, Ectromelia virus
gcacaccgcagaacgcc

SEQ ID NO: 4175 - DNA, 21 bp, Homo sapiens
acacaccgacactcggatgcc

SEQ ID NO: 4176 - DNA, 18 bp, Homo sapiens
acacaccagcatgaatgc

SEQ ID NO: 4177 - DNA, 19 bp, Homo sapiens
gcacaccggcagggcggcc

SEQ ID NO: 4178 - DNA, 18 bp, Homo sapiens
cacagcctccagagcgcc

SEQ ID NO: 4179 - DNA, 79 bp, Equine herpesvirus 2
aagaatatatcttaagatagtagcttttctgaaagagatatatatattaagagtactactatcttgcgatattagtctt

SEQ ID NO: 4180 - DNA, 24 bp, Equine herpesvirus 2
tatcttaagatagtagcttttctg

SEQ ID NO: 4181 - DNA, 24 bp, Equine herpesvirus 2
tactactatcttgcgatattagtc

SEQ ID NO: 4182 - DNA, 21 bp, Homo sapiens
tactatcttgctcccattagt

SEQ ID NO: 4183 - DNA, 80 bp, Equine herpesvirus 2
tgtcctctatgggtctcagatgcctggcggccctgccgtacacgtggaggttgcccggggttatctgcgacccgtggaca

SEQ ID NO: 4184 - DNA, 24 bp, Equine herpesvirus 2
tatgggtctcagatgcctggcggc

SEQ ID NO: 4185 - DNA, 24 bp, Equine herpesvirus 2
tgcccggggttatctgcgacccgt

SEQ ID NO: 4186 - DNA, 18 bp, Homo sapiens
gggccggatgcctggtgg

SEQ ID NO: 4187 - DNA, 85 bp, Equine herpesvirus 2
aaattttaaactgcaatgtctcctctgaaaactctgatagattatctctaagagttttatctaaagattttttttcctaagattt

SEQ ID NO: 4188 - DNA, 24 bp, Equine herpesvirus 2
taagagttttatctaaagattttt

SEQ ID NO: 4189 - DNA, 24 bp, Equine herpesvirus 2
tttaaactgcaatgtctcctctga

SEQ ID NO: 4190 - DNA, 16 bp, Homo sapiens
aagagttcaaagattt

SEQ ID NO: 4191 - DNA, 65 bp, Equine herpesvirus 2
gatgcgggagataagccaaactttataaagaccatggtcgtcaagtacctggacgtctttctgtc

SEQ ID NO: 4192 - DNA, 24 bp, Equine herpesvirus 2
gtcaagtacctggacgtctttctg

SEQ ID NO: 4193 - DNA, 24 bp, Equine herpesvirus 2
agccaaactttataaagaccatgg

SEQ ID NO: 4194 - DNA, 16 bp, Homo sapiens
agccaaacttgtccat

SEQ ID NO: 4195 - DNA, 24 bp, Homo sapiens
agccagggccaaccaggaccatgg

SEQ ID NO: 4196 - DNA, 24 bp, Homo sapiens
gccaagcaagcagagagaccatgg

SEQ ID NO: 4197 - DNA, 17 bp, Homo sapiens
gcctagcaaagaccatg

SEQ ID NO: 4198 - DNA, 21 bp, Homo sapiens
agtcaaactttctcaccatgg

SEQ ID NO: 4199 - DNA, 18 bp, Homo sapiens
agcccagctttataaaga

SEQ ID NO: 4200 - DNA, 19 bp, Homo sapiens
agcactcatggagaccatg

SEQ ID NO: 4201 - DNA, 22 bp, Homo sapiens
gcacagacacctaagaccatgg

SEQ ID NO: 4202 - DNA, 19 bp, Homo sapiens
accagactttataggcatg

SEQ ID NO: 4203 - DNA, 19 bp, Homo sapiens
agtcaatcccaggaccatg

SEQ ID NO: 4204 - DNA, 74 bp, Equine herpesvirus 2
tattatcgaaattgtattaggagaaattataagacaatttttttatcaccattccagaattaagtttgataata

SEQ ID NO: 4205 - DNA, 24 bp, Equine herpesvirus 2
tattaggagaaattataagacaat

SEQ ID NO: 4206 - DNA, 22 bp, Equine herpesvirus 2
tccagaattaagtttgataata

SEQ ID NO: 4207 - DNA, 20 bp, Homo sapiens
tccagaatcagtatgtaata

SEQ ID NO: 4208 - DNA, 21 bp, Homo sapiens
tccagaactaggaagaaaata

SEQ ID NO: 4209 - DNA, 22 bp, Homo sapiens
tccagaattcaaggggccaata

SEQ ID NO: 4210 - DNA, 22 bp, Homo sapiens
tccagaatctcccaggatgata

SEQ ID NO: 4211 - DNA, 19 bp, Homo sapiens
cagaattaagaatataata

SEQ ID NO: 4212 - DNA, 73 bp, Equine herpesvirus 2
acgtccagcctctcggccgaggacgccgtggtagacgagtggtgcacagtctcgggcctgaagggaaggacgt

SEQ ID NO: 4213 - DNA, 24 bp, Equine herpesvirus 2
tgcacagtctcgggcctgaaggga

SEQ ID NO: 4214 - DNA, 24 bp, Equine herpesvirus 2
tctcggccgaggacgccgtggtag

SEQ ID NO: 4215 - DNA, 15 bp, Homo sapiens
tgcaaggtctgaagg

SEQ ID NO: 4216 - DNA, 22 bp, Homo sapiens
tacacagtcttaagtgggggga

SEQ ID NO: 4217 - DNA, 19 bp, Homo sapiens
gcgcggtctcgggcgcggg

SEQ ID NO: 4218 - DNA, 19 bp, Homo sapiens
cagtgctgggcctgaaggg

SEQ ID NO: 4219 - DNA, 21 bp, Homo sapiens
gcacaatctgggcttgaaggg

SEQ ID NO: 4220 - DNA, 16 bp, Homo sapiens
cagcgggcctgaaggg

SEQ ID NO: 4221 - DNA, 21 bp, Homo sapiens
cacagacataggcctgagggg

SEQ ID NO: 4222 - DNA, 25 bp, Homo sapiens
tgcctaaagctttgggtctgaaggg

SEQ ID NO: 4223 - DNA, 91 bp, Human herpesvirus 7
gatgcctgaccgcctcactgctgtcctaaacaggtacaagatgtactttctcaaggaccaaaagtttagcctgagcgggacaatcaggatc

SEQ ID NO: 4224 - DNA, 24 bp, Human herpesvirus 7
aaggaccaaaagtttagcctgagc

SEQ ID NO: 4225 - DNA, 24 bp, Human herpesvirus 7
tgcctgaccgcctcactgctgtcc

SEQ ID NO: 4226 - DNA, 21 bp, Homo sapiens
aggttcgagatcagcctgggc

SEQ ID NO: 4227 - DNA, 20 bp, Homo sapiens
agggctaacttagcctgggc

SEQ ID NO: 4228 - DNA, 21 bp, Homo sapiens
aaggagtaaaagtttcttgag

SEQ ID NO: 4229 - DNA, 19 bp, Homo sapiens
aggattgcttgagcctgag

SEQ ID NO: 4230 - DNA, 18 bp, Homo sapiens
ggaggtctttggcctgag

SEQ ID NO: 4231 - DNA, 23 bp, Homo sapiens
aacgatcaaaacttggcctgagc

SEQ ID NO: 4232 - DNA, 23 bp, Homo sapiens
aggggttcaagaccagcctgggc

SEQ ID NO: 4233 - DNA, 19 bp, Homo sapiens
aggagccaaaagtatgggc

SEQ ID NO: 4234 - DNA, 20 bp, Homo sapiens
gactaaaagagtacctgagc

SEQ ID NO: 4235 - DNA, 21 bp, Homo sapiens
agggtcgagtggggcctgagc

SEQ ID NO: 4236 - DNA, 22 bp, Homo sapiens
aaggccaggaggccacctgagc

SEQ ID NO: 4237 - DNA, 23 bp, Homo sapiens
aggagcaagatccaggcctgagc

SEQ ID NO: 4238 - DNA, 20 bp, Homo sapiens
aggatcaaaagttgagaagc

SEQ ID NO: 4239 - DNA, 24 bp, Homo sapiens
aaggggcagctaggcggcctgagc

SEQ ID NO: 4240 - DNA, 23 bp, Homo sapiens
aggtggctgggctcagcctgagc

SEQ ID NO: 4241 - DNA, 19 bp, Homo sapiens
aaggaccagggctttggag

SEQ ID NO: 4242 - DNA, 20 bp, Homo sapiens
aaggaccagaatgtttatgc

SEQ ID NO: 4243 - DNA, 18 bp, Homo sapiens
aagaccagaccagcctgg

SEQ ID NO: 4244 - DNA, 18 bp, Homo sapiens
aagaccaataggtctgag

SEQ ID NO: 4245 - DNA, 22 bp, Homo sapiens
aggctgaagcccaggcctgggc

SEQ ID NO: 4246 - DNA, 21 bp, Homo sapiens
ggattggggctgggcctgagc

SEQ ID NO: 4247 - DNA, 18 bp, Homo sapiens
aagaatcaaaagtttagc

SEQ ID NO: 4248 - DNA, 24 bp, Homo sapiens
ggagaccaaaagctgctcctgggc

SEQ ID NO: 4249 - DNA, 17 bp, Homo sapiens
aagggttagggcctgag

SEQ ID NO: 4250 - DNA, 20 bp, Homo sapiens
agggcaggggtctcctgagc

SEQ ID NO: 4251 - DNA, 19 bp, Homo sapiens
ggccagctccagcctgggc

SEQ ID NO: 4252 - DNA, 21 bp, Homo sapiens
agggcccaggaacagcctgag

SEQ ID NO: 4253 - DNA, 19 bp, Homo sapiens
aggagttgagaccagcctg

SEQ ID NO: 4254 - DNA, 19 bp, Homo sapiens
tgcccggccgccacctgtc

SEQ ID NO: 4255 - DNA, 21 bp, Homo sapiens
tgcctgaccgcctctggagct

SEQ ID NO: 4256 - DNA, 20 bp, Homo sapiens
tgtctggctgtcccactgct

SEQ ID NO: 4257 - DNA, 21 bp, Homo sapiens
gccatgattttgttgctgtcc

SEQ ID NO: 4258 - DNA, 20 bp, Homo sapiens
gcctatgcttgctgctgtcc

SEQ ID NO: 4259 - DNA, 17 bp, Homo sapiens
tgtctactacctgctgt

SEQ ID NO: 4260 - DNA, 21 bp, Homo sapiens
tgcctgaccggctcaccagcc

SEQ ID NO: 4261 - DNA, 18 bp, Homo sapiens
tgtctgccgcctcgcgcc

SEQ ID NO: 4262 - DNA, 20 bp, Homo sapiens
tgcctgacgtttcacagacc

SEQ ID NO: 4263 - DNA, 20 bp, Homo sapiens
tgccgggccgcctcaccacc

SEQ ID NO: 4264 - DNA, 18 bp, Homo sapiens
tgctgacctaactgctgt

SEQ ID NO: 4265 - DNA, 62 bp, Human herpesvirus 7
gagattcttgcagcggatatttatacgggattagtttgagtagagtacacatgcggagcatc

SEQ ID NO: 4266 - DNA, 24 bp, Human herpesvirus 7
tgagtagagtacacatgcggagca

SEQ ID NO: 4267 - DNA, 24 bp, Human herpesvirus 7
ttgcagcggatatttatacgggat

SEQ ID NO: 4268 - DNA, 20 bp, Homo sapiens
tgagaagagtgtatacaaag

SEQ ID NO: 4269 - DNA, 19 bp, Homo sapiens
tgagcagagtagccattgg

SEQ ID NO: 4270 - DNA, 23 bp, Homo sapiens
gagtagagtgcacagtgtgctcg

SEQ ID NO: 4271 - DNA, 18 bp, Homo sapiens
tgagtagagttattgagc

SEQ ID NO: 4272 - DNA, 21 bp, Homo sapiens
tgagtagagtaagggagagca

SEQ ID NO: 4273 - DNA, 19 bp, Homo sapiens
tgagcggggtacacatgga

SEQ ID NO: 4274 - DNA, 21 bp, Homo sapiens
tgggcagagtagggtggggca

SEQ ID NO: 4275 - DNA, 19 bp, Homo sapiens
tggtggggtacacaaaagc

SEQ ID NO: 4276 - DNA, 67 bp, Human herpesvirus 7
aggggaacttatgactgttataaaaaataagaataagattccatttttattattatctggttctcct

SEQ ID NO: 4277 - DNA, 24 bp, Human herpesvirus 7
tgttataaaaaataagaataagat

SEQ ID NO: 4278 - DNA, 24 bp, Human herpesvirus 7
tccatttttattattatctggttc

SEQ ID NO: 4279 - DNA, 19 bp, Homo sapiens
tgttataaaaataagaaca

SEQ ID NO: 4280 - DNA, 19 bp, Homo sapiens
tgttaggaaaaataagaat

SEQ ID NO: 4281 - DNA, 63 bp, Human herpesvirus 7
acatgtcctccctgctcaccatgaagaacctcatgcacgtggttgtcgcggaggagggcctgt

SEQ ID NO: 4282 - DNA, 18 bp, Human herpesvirus 7
tcgcggaggagggcctgt

SEQ ID NO: 4283 - DNA, 24 bp, Human herpesvirus 7
cctccctgctcaccatgaagaacc

SEQ ID NO: 4284 - DNA, 21 bp, Homo sapiens
cgtggaggaggcaaatcctgt

SEQ ID NO: 4285 - DNA, 18 bp, Homo sapiens
tcgtggaggagaacttgt

SEQ ID NO: 4286 - DNA, 17 bp, Homo sapiens
ccgtggacagagcttgt

SEQ ID NO: 4287 - DNA, 18 bp, Homo sapiens
ccgccagacagggcctgt

SEQ ID NO: 4288 - DNA, 18 bp, Homo sapiens
tccagacagggggcctgt

SEQ ID NO: 4289 - DNA, 16 bp, Homo sapiens
ccgcggagcggcctgt

SEQ ID NO: 4290 - DNA, 16 bp, Homo sapiens
tcacccaagggcctgt

SEQ ID NO: 4291 - DNA, 18 bp, Homo sapiens
cgtggtggcagggcctgt

SEQ ID NO: 4292 - DNA, 15 bp, Homo sapiens
tctggagaaagctgt

SEQ ID NO: 4293 - DNA, 16 bp, Homo sapiens
tcgcagtcaggcctgt

SEQ ID NO: 4294 - DNA, 17 bp, Homo sapiens
tcgaggtgggggcctgt

SEQ ID NO: 4295 - DNA, 18 bp, Homo sapiens
tcgcggagcagccagcct

SEQ ID NO: 4296 - DNA, 16 bp, Homo sapiens
tcgggaggagaacagt

SEQ ID NO: 4297 - DNA, 15 bp, Homo sapiens
tctggagaaacctgt

SEQ ID NO: 4298 - DNA, 14 bp, Homo sapiens
ccgcggggacctgc

SEQ ID NO: 4299 - DNA, 20 bp, Homo sapiens
ccgcggagctgcgagcctgt

SEQ ID NO: 4300 - DNA, 16 bp, Homo sapiens
tcacggaaattcctgt

SEQ ID NO: 4301 - DNA, 18 bp, Homo sapiens
tcacggaactatacctgt

SEQ ID NO: 4302 - DNA, 19 bp, Homo sapiens
ccgcggagctgaggtctgt

SEQ ID NO: 4303 - DNA, 18 bp, Homo sapiens
tcacacaccagggcctgt

SEQ ID NO: 4304 - DNA, 16 bp, Homo sapiens
tcccggagcaaactgt

SEQ ID NO: 4305 - DNA, 17 bp, Homo sapiens
cctcctgttcaccacga

SEQ ID NO: 4306 - DNA, 18 bp, Homo sapiens
tctctgcccaccagcaga

SEQ ID NO: 4307 - DNA, 18 bp, Homo sapiens
tccatctcatcatgaaga

SEQ ID NO: 4308 - DNA, 19 bp, Homo sapiens
cctgacacaatgaagaacc

SEQ ID NO: 4309 - DNA, 23 bp, Homo sapiens
cctcttttctcactgtgaagaac

SEQ ID NO: 4310 - DNA, 19 bp, Homo sapiens
ctgccacactgtgaagaac

SEQ ID NO: 4311 - DNA, 21 bp, Homo sapiens
ctccctgctccctttgggaac

SEQ ID NO: 4312 - DNA, 20 bp, Homo sapiens
cctccctgttcccactcccc

SEQ ID NO: 4313 - DNA, 22 bp, Homo sapiens
cctcgttggtaggtgaagaacc

SEQ ID NO: 4314 - DNA, 16 bp, Homo sapiens
tccctgcttactgaac

SEQ ID NO: 4315 - DNA, 21 bp, Homo sapiens
cctccctgtcactgccacacc

SEQ ID NO: 4316 - DNA, 21 bp, Homo sapiens
cccctgctcaccattggagaa

SEQ ID NO: 4317 - DNA, 19 bp, Homo sapiens
ctctcctgaaacatgaaga

SEQ ID NO: 4318 - DNA, 20 bp, Homo sapiens
tccctgcccactgcactgag

SEQ ID NO: 4319 - DNA, 24 bp, Homo sapiens
ccatccctgctcatttcccagacc

SEQ ID NO: 4320 - DNA, 20 bp, Homo sapiens
tccccgctgcggggagagcc

SEQ ID NO: 4321 - DNA, 22 bp, Homo sapiens
cctgcctgctctctggggaacc

SEQ ID NO: 4322 - DNA, 18 bp, Homo sapiens
cctctcggcttgaagaac

SEQ ID NO: 4323 - DNA, 19 bp, Homo sapiens
cctctctgcccaccagaga

SEQ ID NO: 4324 - DNA, 24 bp, Homo sapiens
cctccctgccgctgcagcagagcc

SEQ ID NO: 4325 - DNA, 22 bp, Homo sapiens
ccttccttagtgaatgaagaac

SEQ ID NO: 4326 - DNA, 18 bp, Homo sapiens
tccctttcattgaaaaac

SEQ ID NO: 4327 - DNA, 17 bp, Homo sapiens
ctccctgcctgggagac

SEQ ID NO: 4328 - DNA, 20 bp, Homo sapiens
tccctgtccaccacaacacc

SEQ ID NO: 4329 - DNA, 20 bp, Homo sapiens
cctccctatctttgaagaac

SEQ ID NO: 4330 - DNA, 20 bp, Homo sapiens
ctccctgcttgtttagagcc

SEQ ID NO: 4331 - DNA, 20 bp, Homo sapiens
ctccccgcttcagctaagga

SEQ ID NO: 4332 - DNA, 17 bp, Homo sapiens
ccctgcttatgaggaac

SEQ ID NO: 4333 - DNA, 16 bp, Homo sapiens
tccctgctcttgagga

SEQ ID NO: 4334 - DNA, 19 bp, Homo sapiens
cctccctgctattagatac

SEQ ID NO: 4335 - DNA, 75 bp, Human herpesvirus 7
cacctgctgaacgcgggcttcgcctgccacggccccccgggcctcagccacggccagctcgccacctgcgaggtg

SEQ ID NO: 4336 - DNA, 24 bp, Human herpesvirus 7
cagccacggccagctcgccacctg

SEQ ID NO: 4337 - DNA, 24 bp, Human herpesvirus 7
acgcgggcttcgcctgccacggcc

SEQ ID NO: 4338 - DNA, 19 bp, Homo sapiens
ggccatggcccaccacctg

SEQ ID NO: 4339 - DNA, 22 bp, Homo sapiens
gctgtgggacaggtgccacctg

SEQ ID NO: 4340 - DNA, 20 bp, Homo sapiens
gcggcggcagcagccacctg

SEQ ID NO: 4341 - DNA, 19 bp, Homo sapiens
gcttggccagcctcatctg

SEQ ID NO: 4342 - DNA, 16 bp, Homo sapiens
gccacggccggcccct

SEQ ID NO: 4343 - DNA, 23 bp, Homo sapiens
gccgcggccagcctgcccttctg

SEQ ID NO: 4344 - DNA, 20 bp, Homo sapiens
agtcctggtcctgccacctg

SEQ ID NO: 4345 - DNA, 19 bp, Homo sapiens
cagcgtggccagccaggcc

SEQ ID NO: 4346 - DNA, 17 bp, Homo sapiens
cagccacggcctcttgc

SEQ ID NO: 4347 - DNA, 21 bp, Homo sapiens
gctcacgcagcttgccacctg

SEQ ID NO: 4348 - DNA, 23 bp, Homo sapiens
cagcctggtacagctgccacctg

SEQ ID NO: 4349 - DNA, 23 bp, Homo sapiens
gcggcggccagccgggctgcctg

SEQ ID NO: 4350 - DNA, 22 bp, Homo sapiens
cagccatggtggcatgcacctg

SEQ ID NO: 4351 - DNA, 22 bp, Homo sapiens
cagctgtggtggctcacgtctg

SEQ ID NO: 4352 - DNA, 21 bp, Homo sapiens
gccacggctgcctggcctctg

SEQ ID NO: 4353 - DNA, 20 bp, Homo sapiens
gccacagcctcgctcatctg

SEQ ID NO: 4354 - DNA, 22 bp, Homo sapiens
cagccgctgcaggtgccacctg

SEQ ID NO: 4355 - DNA, 22 bp, Homo sapiens
accacggcggcgacgctgcctg

SEQ ID NO: 4356 - DNA, 18 bp, Homo sapiens
cgcgggctgcgccccggc

SEQ ID NO: 4357 - DNA, 16 bp, Homo sapiens
cgggctccgccgcggc

SEQ ID NO: 4358 - DNA, 19 bp, Homo sapiens
gcggctccgcgccgcggcc

SEQ ID NO: 4359 - DNA, 19 bp, Homo sapiens
cgcgggctgtgccgggggc

SEQ ID NO: 4360 - DNA, 15 bp, Homo sapiens
gggcttcggccgcgg

SEQ ID NO: 4361 - DNA, 16 bp, Homo sapiens
gggctgctgccacggc

SEQ ID NO: 4362 - DNA, 21 bp, Homo sapiens
gcttgccacgcctgccatggc

SEQ ID NO: 4363 - DNA, 18 bp, Homo sapiens
gcgggctttcacatggcc

SEQ ID NO: 4364 - DNA, 18 bp, Homo sapiens
gcgggcttcgctgggggc

SEQ ID NO: 4365 - DNA, 21 bp, Homo sapiens
gcgggcttcgctccccgcggc

SEQ ID NO: 4366 - DNA, 18 bp, Homo sapiens
cgggctccttgctgtggc

SEQ ID NO: 4367 - DNA, 18 bp, Homo sapiens
cgcgggcctggttgcggc

SEQ ID NO: 4368 - DNA, 21 bp, Homo sapiens
cgcgggctgcgcgccacggcc

SEQ ID NO: 4369 - DNA, 18 bp, Homo sapiens
gcgcgctggggccacggc

SEQ ID NO: 4370 - DNA, 26 bp, Homo sapiens
gcgggctttgccttgtcggccgtggc

SEQ ID NO: 4371 - DNA, 16 bp, Homo sapiens
gcgggagctgccacgg

SEQ ID NO: 4372 - DNA, 20 bp, Homo sapiens
cgcgggctccgcgaggccgg

SEQ ID NO: 4373 - DNA, 18 bp, Homo sapiens
cgtgggcttcgcctggcc

SEQ ID NO: 4374 - DNA, 61 bp, Human herpesvirus 7
gctctccgacgtcagccgcgcagggcacgtaccagcactggtcggggtaggcgtggagagt

SEQ ID NO: 4375 - DNA, 24 bp, Human herpesvirus 7
actggtcggggtaggcgtggagag

SEQ ID NO: 4376 - DNA, 24 bp, Human herpesvirus 7
tctccgacgtcagccgcgcagggc

SEQ ID NO: 4377 - DNA, 18 bp, Homo sapiens
catccaggctgcgcaggg

SEQ ID NO: 4378 - DNA, 19 bp, Homo sapiens
tctttggggtcagccaggg

SEQ ID NO: 4379 - DNA, 22 bp, Homo sapiens
cctctgactctcctgcgcaggg

SEQ ID NO: 4380 - DNA, 23 bp, Homo sapiens
tcgtccggtgcccggcgcagggc

SEQ ID NO: 4381 - DNA, 19 bp, Homo sapiens
cctctgacgtcagcccagg

SEQ ID NO: 4382 - DNA, 63 bp, Human herpesvirus 7
tctggggtccaggacacaatctctgctagagcgcaaccgcggggagggttcctgagctctgga

SEQ ID NO: 4383 - DNA, 24 bp, Human herpesvirus 7
tccaggacacaatctctgctagag

SEQ ID NO: 4384 - DNA, 23 bp, Human herpesvirus 7
ggggagggttcctgagctctgga

SEQ ID NO: 4385 - DNA, 22 bp, Homo sapiens
gggggccgacttgagctttgga

SEQ ID NO: 4386 - DNA, 21 bp, Homo sapiens
ggggagaggctggggctctgg

SEQ ID NO: 4387 - DNA, 16 bp, Homo sapiens
gggagggtcgctctgg

SEQ ID NO: 4388 - DNA, 17 bp, Homo sapiens
ggggagggtccctgcgg

SEQ ID NO: 4389 - DNA, 22 bp, Homo sapiens
aggcccattcctgagttctgga

SEQ ID NO: 4390 - DNA, 20 bp, Homo sapiens
gggtggctctgagctctgga

SEQ ID NO: 4391 - DNA, 21 bp, Homo sapiens
ggggagagcaaggggctttgg

SEQ ID NO: 4392 - DNA, 17 bp, Homo sapiens
ggggagggtcctgcagg

SEQ ID NO: 4393 - DNA, 72 bp, Human herpesvirus 7
tgggtggttaacaagaacaacaccctgctgcgctttgactacacctgcgccctcaggtccctctgccaccca

SEQ ID NO: 4394 - DNA, 24 bp, Human herpesvirus 7
ctgcgccctcaggtccctctgcca

SEQ ID NO: 4395 - DNA, 24 bp, Human herpesvirus 7
caccctgctgcgctttgactacac

SEQ ID NO: 4396 - DNA, 19 bp, Homo sapiens
tgcgccctcacgtcccctg

SEQ ID NO: 4397 - DNA, 19 bp, Homo sapiens
tgtgctctgccctctgcca

SEQ ID NO: 4398 - DNA, 21 bp, Homo sapiens
ctgcgctctcaggccggactc

SEQ ID NO: 4399 - DNA, 18 bp, Homo sapiens
ccgcgctctcggcctgcc

SEQ ID NO: 4400 - DNA, 17 bp, Homo sapiens
tgctccctcctctgcca

SEQ ID NO: 4401 - DNA, 17 bp, Homo sapiens
ctgcttgatccctctgc

SEQ ID NO: 4402 - DNA, 16 bp, Homo sapiens
ctggtcccccctctgc

SEQ ID NO: 4403 - DNA, 19 bp, Homo sapiens
cgcctcgccttcctctgcc

SEQ ID NO: 4404 - DNA, 17 bp, Homo sapiens
tggcccagtcctctgcc

SEQ ID NO: 4405 - DNA, 17 bp, Homo sapiens
gcgcccgctcctctgcc

SEQ ID NO: 4406 - DNA, 21 bp, Homo sapiens
ctgcacagtgtctctttgtca

SEQ ID NO: 4407 - DNA, 23 bp, Homo sapiens
ctgggcaggaggtccttctgcca

SEQ ID NO: 4408 - DNA, 24 bp, Homo sapiens
gcctctcagaccaggcctctgcca

SEQ ID NO: 4409 - DNA, 21 bp, Homo sapiens
ctgcccttctcagctctgcca

SEQ ID NO: 4410 - DNA, 22 bp, Homo sapiens
ctgcgccctcagctcacgtctg

SEQ ID NO: 4411 - DNA, 16 bp, Homo sapiens
tgtgcctcaggtcctc

SEQ ID NO: 4412 - DNA, 24 bp, Homo sapiens
ctgtgccatctcccctctctgcca

SEQ ID NO: 4413 - DNA, 15 bp, Homo sapiens
ctggcccccctttgc

SEQ ID NO: 4414 - DNA, 17 bp, Homo sapiens
gccctggctctctgcca

SEQ ID NO: 4415 - DNA, 21 bp, Homo sapiens
ctgtgcccccaggctctgcca

SEQ ID NO: 4416 - DNA, 22 bp, Homo sapiens
ctgtgtcctctcccctttctgc

SEQ ID NO: 4417 - DNA, 17 bp, Homo sapiens
ctgtcctctctctctgc

SEQ ID NO: 4418 - DNA, 20 bp, Homo sapiens
ctgtgccccaggtcctccct

SEQ ID NO: 4419 - DNA, 19 bp, Homo sapiens
ctgctcccactcctctgcc

SEQ ID NO: 4420 - DNA, 18 bp, Homo sapiens
ctgctcactccctctgcc

SEQ ID NO: 4421 - DNA, 18 bp, Homo sapiens
ctgtcccaccccctctgc

SEQ ID NO: 4422 - DNA, 22 bp, Homo sapiens
ctgtgtccttgttcctctgcca

SEQ ID NO: 4423 - DNA, 18 bp, Homo sapiens
ctgcgccctcgcactgcc

SEQ ID NO: 4424 - DNA, 16 bp, Homo sapiens
ctgcccctcagtctgc

SEQ ID NO: 4425 - DNA, 18 bp, Homo sapiens
ctcaaaccatctctgcca

SEQ ID NO: 4426 - DNA, 21 bp, Homo sapiens
gccttccttcttcctctgcca

SEQ ID NO: 4427 - DNA, 18 bp, Homo sapiens
ctgtgcctcaggtgggcc

SEQ ID NO: 4428 - DNA, 18 bp, Homo sapiens
tgcatcctcaggtttcta

SEQ ID NO: 4429 - DNA, 24 bp, Homo sapiens
ctgtggcctcctgtgcctctgcca

SEQ ID NO: 4430 - DNA, 22 bp, Homo sapiens
ctgcgcccttggggcgtggctg

SEQ ID NO: 4431 - DNA, 19 bp, Homo sapiens
gcctcggcaacccctctgc

SEQ ID NO: 4432 - DNA, 15 bp, Homo sapiens
tgcgccctgctctgc

SEQ ID NO: 4433 - DNA, 20 bp, Homo sapiens
tgtgcctgtcatctctgcca

SEQ ID NO: 4434 - DNA, 17 bp, Homo sapiens
gccctcaggtcacacca

SEQ ID NO: 4435 - DNA, 128 bp, Human herpesvirus 7
cccctgtttgacttttacgcggtgggcgcgccgggcgccaggggtgtggcctacagggccacccacaggggcatggtgggcaacatcccccagtccctggcccccgccgggtttcaggagtgcagggg

SEQ ID NO: 4436 - DNA, 24 bp, Human herpesvirus 7
tcccccagtccctggcccccgccg

SEQ ID NO: 4437 - DNA, 24 bp, Human herpesvirus 7
aggggtgtggcctacagggccacc

SEQ ID NO: 4438 - DNA, 19 bp, Homo sapiens
ccccagggagcccccgccg

SEQ ID NO: 4439 - DNA, 21 bp, Homo sapiens
tccaccagtccctggaacccg

SEQ ID NO: 4440 - DNA, 18 bp, Homo sapiens
tcccccatccctggtccc

SEQ ID NO: 4441 - DNA, 18 bp, Homo sapiens
tcccacagaagcccccgc

SEQ ID NO: 4442 - DNA, 26 bp, Homo sapiens
tctcctggccctgggggcgcccgccg

SEQ ID NO: 4443 - DNA, 18 bp, Homo sapiens
tcccccagctctggcccc

SEQ ID NO: 4444 - DNA, 23 bp, Homo sapiens
tctcctgtcccgcgaccccgccg

SEQ ID NO: 4445 - DNA, 21 bp, Homo sapiens
ccactgttctggcccctgccg

SEQ ID NO: 4446 - DNA, 24 bp, Homo sapiens
tcctctggtccctgatcctaggcc

SEQ ID NO: 4447 - DNA, 22 bp, Homo sapiens
ccccccggggcagcccccgccg

SEQ ID NO: 4448 - DNA, 21 bp, Homo sapiens
tcccctagcgccatcccctgc

SEQ ID NO: 4449 - DNA, 20 bp, Homo sapiens
gtctccggtcctccccgccg

SEQ ID NO: 4450 - DNA, 23 bp, Homo sapiens
tcccccagctcccagctccctgc

SEQ ID NO: 4451 - DNA, 20 bp, Homo sapiens
ccccggccctggaaaggccg

SEQ ID NO: 4452 - DNA, 24 bp, Homo sapiens
cctcccagtccctccactctgccg

SEQ ID NO: 4453 - DNA, 18 bp, Homo sapiens
cccggtcgctccccgccg

SEQ ID NO: 4454 - DNA, 21 bp, Homo sapiens
tctcccgcaccgctcccgccg

SEQ ID NO: 4455 - DNA, 18 bp, Homo sapiens
tcccccagatcttccctg

SEQ ID NO: 4456 - DNA, 16 bp, Homo sapiens
ccccagtccagctcgc

SEQ ID NO: 4457 - DNA, 20 bp, Homo sapiens
cccccggccggggccctcgc

SEQ ID NO: 4458 - DNA, 118 bp, Human herpesvirus 7
ggggcccgccagctacgcgagctacgtggtcaggggggacaacctggtgacggccgtcagctacgggcgggccatggtcgccttcgaccagtttgtgtccaggctggtggacaacccc

SEQ ID NO: 4459 - DNA, 24 bp, Human herpesvirus 7
gcgggccatggtcgccttcgacca

SEQ ID NO: 4460 - DNA, 24 bp, Human herpesvirus 7
aggggggacaacctggtgacggcc

SEQ ID NO: 4461 - DNA, 18 bp, Homo sapiens
gggttgaagtccttcgac

SEQ ID NO: 4462 - DNA, 18 bp, Homo sapiens
gcgggccatggtccctcc

SEQ ID NO: 4463 - DNA, 19 bp, Homo sapiens
gcgggccatggctgggacc

SEQ ID NO: 4464 - DNA, 77 bp, Alcelaphine herpesvirus 1
gcgtctaaatttaaaaaagtttatatattagtaccaaatataaatatactaaagatttttaattatagtatggacgt

SEQ ID NO: 4465 - DNA, 24 bp, Alcelaphine herpesvirus 1
tctaaatttaaaaaagtttatata

SEQ ID NO: 4466 - DNA, 24 bp, Alcelaphine herpesvirus 1
taaatatactaaagatttttaatt

SEQ ID NO: 4467 - DNA, 19 bp, Homo sapiens
tctaaattttaaaaagctt

SEQ ID NO: 4468 - DNA, 60 bp, Alcelaphine herpesvirus 1
tgtttacaatagtaactagtaaaatgaagtcatcattagaagatttattatctgtataca

SEQ ID NO: 4469 - DNA, 24 bp, Alcelaphine herpesvirus 1
ttagaagatttattatctgtatac

SEQ ID NO: 4470 - DNA, 24 bp, Alcelaphine herpesvirus 1
tttacaatagtaactagtaaaatg

SEQ ID NO: 4471 - DNA, 19 bp, Homo sapiens
gaagatttacaaggtatac

SEQ ID NO: 4472 - DNA, 17 bp, Homo sapiens
tttacaatagaaactgt

SEQ ID NO: 4473 - DNA, 105 bp, Alcelaphine herpesvirus 1
ggttagaaacatttggtttatgacaattccggataccttttctcagtataatcaaatcttgggaagatcaataagaaagttttcatataataatataacagaacc

SEQ ID NO: 4474 - DNA, 24 bp, Alcelaphine herpesvirus 1
tatgacaattccggataccttttc

SEQ ID NO: 4475 - DNA, 24 bp, Alcelaphine herpesvirus 1
tgggaagatcaataagaaagtttt

SEQ ID NO: 4476 - DNA, 20 bp, Homo sapiens
tgacaattccagtggctttc

SEQ ID NO: 4477 - DNA, 23 bp, Homo sapiens
tatgacaattcatttctcttttc

SEQ ID NO: 4478 - DNA, 21 bp, Homo sapiens
atgacaattcgttcccttttc

SEQ ID NO: 4479 - DNA, 20 bp, Homo sapiens
cataaccaagataccttttc

SEQ ID NO: 4480 - DNA, 20 bp, Homo sapiens
tgacaagtgacaaccttttc

SEQ ID NO: 4481 - DNA, 18 bp, Homo sapiens
tggggagatcaatgaaga

SEQ ID NO: 4482 - DNA, 18 bp, Homo sapiens
tggggagcgagaaagttt

SEQ ID NO: 4483 - DNA, 18 bp, Homo sapiens
tgggagggtcataagaaa

SEQ ID NO: 4484 - DNA, 23 bp, Homo sapiens
tggagagagaggaagaaagtttt

SEQ ID NO: 4485 - DNA, 64 bp, Alcelaphine herpesvirus 1
ggctgcctaatcttacagggagcagaaagacacacagactctgctatcgggagatcaaggtgcc

SEQ ID NO: 4486 - DNA, 23 bp, Alcelaphine herpesvirus 1
tgctatcgggagatcaaggtgcc

SEQ ID NO: 4487 - DNA, 24 bp, Alcelaphine herpesvirus 1
tgcctaatcttacagggagcagaa

SEQ ID NO: 4488 - DNA, 14 bp, Homo sapiens
tgctattcaaggtg

SEQ ID NO: 4489 - DNA, 22 bp, Homo sapiens
tgccattcaaaattaaggtgcc

SEQ ID NO: 4490 - DNA, 18 bp, Homo sapiens
tgctattgtggaggatgc

SEQ ID NO: 4491 - DNA, 18 bp, Homo sapiens
tgtatcagattgaggtgc

SEQ ID NO: 4492 - DNA, 14 bp, Homo sapiens
tatcgggaaaggtg

SEQ ID NO: 4493 - DNA, 23 bp, Homo sapiens
tgcttactgaagaagggagcaga

SEQ ID NO: 4494 - DNA, 19 bp, Homo sapiens
tgcctattcttacaacaga

SEQ ID NO: 4495 - DNA, 18 bp, Homo sapiens
tgcccaatcttgggcaga

SEQ ID NO: 4496 - DNA, 15 bp, Homo sapiens
ctgatctgagagcag

SEQ ID NO: 4497 - DNA, 24 bp, Homo sapiens
tgcctaatctgtggactaggcaga

SEQ ID NO: 4498 - DNA, 18 bp, Homo sapiens
tgcccaattttatgagaa

SEQ ID NO: 4499 - DNA, 21 bp, Homo sapiens
gcctggccctgtggggagcag

SEQ ID NO: 4500 - DNA, 19 bp, Homo sapiens
tgcctaattttaggaagag

SEQ ID NO: 4501 - DNA, 22 bp, Homo sapiens
tgcccaggagggcagggagcag

SEQ ID NO: 4502 - DNA, 21 bp, Homo sapiens
gcggagcttgcagggagcaga

SEQ ID NO: 4503 - DNA, 131 bp, Alcelaphine herpesvirus 1
ataagtttatatatatattattggcccgagtgcgagccctgggacccgcgccagctctcacgaccgtgcccgtgagaacgctggcagaatgccagcgttcgcacaaaactcaataagtatatatatattat

SEQ ID NO: 4504 - DNA, 24 bp, Alcelaphine herpesvirus 1
tatattattggcccgagtgcgagc

SEQ ID NO: 4505 - DNA, 24 bp, Alcelaphine herpesvirus 1
tgagaacgctggcagaatgccagc

SEQ ID NO: 4506 - DNA, 26 bp, Homo sapiens
tacattattggctttcttttgtgagc

SEQ ID NO: 4507 - DNA, 20 bp, Homo sapiens
tatgtcattggcatctagtg

SEQ ID NO: 4508 - DNA, 22 bp, Homo sapiens
tattattggctgcattacagag

SEQ ID NO: 4509 - DNA, 18 bp, Homo sapiens
tgagatgcaaaatgccag

SEQ ID NO: 4510 - DNA, 19 bp, Homo sapiens
tgagggcactgcatgccag

SEQ ID NO: 4511 - DNA, 20 bp, Homo sapiens
gagggcactgggaatgccag

SEQ ID NO: 4512 - DNA, 14 bp, Homo sapiens
acactggcacgcag

SEQ ID NO: 4513 - DNA, 23 bp, Homo sapiens
tgagaacgctgccagaggccagc

SEQ ID NO: 4514 - DNA, 21 bp, Homo sapiens
tgaaatgcagcaaatgccagc

SEQ ID NO: 4515 - DNA, 16 bp, Homo sapiens
tgggaacgctggggcc

SEQ ID NO: 4516 - DNA, 23 bp, Homo sapiens
gaggggggaagcaggatgccagc

SEQ ID NO: 4517 - DNA, 20 bp, Homo sapiens
gaggagctcaggatgccagc

SEQ ID NO: 4518 - DNA, 23 bp, Homo sapiens
gaggtagctggcaggatgttagc

SEQ ID NO: 4519 - DNA, 21 bp, Homo sapiens
tgagaacgtgggtagtccagc

SEQ ID NO: 4520 - DNA, 21 bp, Homo sapiens
gaggatgctggcaggggacgc

SEQ ID NO: 4521 - DNA, 24 bp, Homo sapiens
tgaggatctgctgaaaatgccagc

SEQ ID NO: 4522 - DNA, 21 bp, Homo sapiens
gctggcaaaggcagtgctggc

SEQ ID NO: 4523 - DNA, 98 bp, Alcelaphine herpesvirus 1
ggcgagggtcctggcagaaggccggccggtcggagctggctagccggccgcggctggatgtctgtctctctggctggccggctttctgctccttcgtc

SEQ ID NO: 4524 - DNA, 24 bp, Alcelaphine herpesvirus 1
tggcagaaggccggccggtcggag

SEQ ID NO: 4525 - DNA, 24 bp, Alcelaphine herpesvirus 1
tggctggccggctttctgctcctt

SEQ ID NO: 4526 - DNA, 18 bp, Homo sapiens
ggcagaaggctggctgga

SEQ ID NO: 4527 - DNA, 20 bp, Homo sapiens
tggcagaaggcgggctgtgg

SEQ ID NO: 4528 - DNA, 18 bp, Homo sapiens
tggcgggaggccggctgg

SEQ ID NO: 4529 - DNA, 20 bp, Homo sapiens
ggcagaaggccggcccagag

SEQ ID NO: 4530 - DNA, 19 bp, Homo sapiens
tggcagaggagccggagag

SEQ ID NO: 4531 - DNA, 18 bp, Homo sapiens
tggcaggtggccggccag

SEQ ID NO: 4532 - DNA, 17 bp, Homo sapiens
tggcggggcggccggtc

SEQ ID NO: 4533 - DNA, 19 bp, Homo sapiens
tggtagagtggctggctgg

SEQ ID NO: 4534 - DNA, 18 bp, Homo sapiens
tggcggaggggcggccgg

SEQ ID NO: 4535 - DNA, 26 bp, Homo sapiens
tggtgcgagggccagaagggttggag

SEQ ID NO: 4536 - DNA, 21 bp, Homo sapiens
tggctgcccaggctgctcctt

SEQ ID NO: 4537 - DNA, 20 bp, Homo sapiens
tggctggcttgtaaggctct

SEQ ID NO: 4538 - DNA, 18 bp, Homo sapiens
tgcctggctggctttcta

SEQ ID NO: 4539 - DNA, 24 bp, Homo sapiens
ggctgaatgtcctttctgcttctt

SEQ ID NO: 4540 - DNA, 80 bp, Alcelaphine herpesvirus 1
tccctgcttgctcacggccgcccctcacccttctccctttcgcgattggcgggaggaccccggcggtgagcaagcaggga

SEQ ID NO: 4541 - DNA, 24 bp, Alcelaphine herpesvirus 1
gaggaccccggcggtgagcaagca

SEQ ID NO: 4542 - DNA, 24 bp, Alcelaphine herpesvirus 1
gcttgctcacggccgcccctcacc

SEQ ID NO: 4543 - DNA, 18 bp, Homo sapiens
ggctgcggcggtggctgc

SEQ ID NO: 4544 - DNA, 18 bp, Homo sapiens
ggacaccgtggggcaggc

SEQ ID NO: 4545 - DNA, 26 bp, Homo sapiens
ggagcccagctggtggtgagtgagca

SEQ ID NO: 4546 - DNA, 19 bp, Homo sapiens
gaggacccttgcccgggtg

SEQ ID NO: 4547 - DNA, 17 bp, Homo sapiens
gggacctcggcggcggc

SEQ ID NO: 4548 - DNA, 23 bp, Homo sapiens
gaggaccctgcacaaagcaggca

SEQ ID NO: 4549 - DNA, 25 bp, Homo sapiens
gagggcattcaccgggtgggtgagc

SEQ ID NO: 4550 - DNA, 22 bp, Homo sapiens
gaaccccggctcggggtaagca

SEQ ID NO: 4551 - DNA, 17 bp, Homo sapiens
ggccccgggagtgagca

SEQ ID NO: 4552 - DNA, 19 bp, Homo sapiens
aaggaccccaggggcaggc

SEQ ID NO: 4553 - DNA, 18 bp, Homo sapiens
aagggtcccggcagcgag

SEQ ID NO: 4554 - DNA, 19 bp, Homo sapiens
gaggcctctgccagcaagc

SEQ ID NO: 4555 - DNA, 19 bp, Homo sapiens
gagggccgcggcgaggggc

SEQ ID NO: 4556 - DNA, 18 bp, Homo sapiens
ggggccagtgggtgagca

SEQ ID NO: 4557 - DNA, 22 bp, Homo sapiens
gaggttcccggcagcccaggca

SEQ ID NO: 4558 - DNA, 18 bp, Homo sapiens
gggtccccagagtgggca

SEQ ID NO: 4559 - DNA, 21 bp, Homo sapiens
ggacccggcggctcgccaggc

SEQ ID NO: 4560 - DNA, 17 bp, Homo sapiens
gaggaccctggagggag

SEQ ID NO: 4561 - DNA, 17 bp, Homo sapiens
gagggccccggcgaagc

SEQ ID NO: 4562 - DNA, 17 bp, Homo sapiens
ggggtcccggcgagagc

SEQ ID NO: 4563 - DNA, 21 bp, Homo sapiens
gagggtcccggcggcaggagc

SEQ ID NO: 4564 - DNA, 17 bp, Homo sapiens
ggccccggagagcaagc

SEQ ID NO: 4565 - DNA, 21 bp, Homo sapiens
gggacccacagtgagtgggca

SEQ ID NO: 4566 - DNA, 22 bp, Homo sapiens
gaggaccccagggttgcaagca

SEQ ID NO: 4567 - DNA, 17 bp, Homo sapiens
gaggaccctgcctgagc

SEQ ID NO: 4568 - DNA, 17 bp, Homo sapiens
ggaccccggttgtcgca

SEQ ID NO: 4569 - DNA, 21 bp, Homo sapiens
ggattccagtagctgtgggca

SEQ ID NO: 4570 - DNA, 16 bp, Homo sapiens
ggacctgcggtgggca

SEQ ID NO: 4571 - DNA, 20 bp, Homo sapiens
gagaaccccaggggcaggca

SEQ ID NO: 4572 - DNA, 19 bp, Homo sapiens
gagatcctggccgtcgggc

SEQ ID NO: 4573 - DNA, 19 bp, Homo sapiens
aggactttggtgataagca

SEQ ID NO: 4574 - DNA, 22 bp, Homo sapiens
gaggacccaggccacacgggca

SEQ ID NO: 4575 - DNA, 17 bp, Homo sapiens
agactttggagtgagca

SEQ ID NO: 4576 - DNA, 25 bp, Homo sapiens
gagggccccggcgcgagaggtgggc

SEQ ID NO: 4577 - DNA, 23 bp, Homo sapiens
gaggaccctgagccctggtgggc

SEQ ID NO: 4578 - DNA, 19 bp, Homo sapiens
ggagccctgtgggtaagca

SEQ ID NO: 4579 - DNA, 17 bp, Homo sapiens
ggatccacagagcaggc

SEQ ID NO: 4580 - DNA, 21 bp, Homo sapiens
gaggaccctggccccaccaag

SEQ ID NO: 4581 - DNA, 18 bp, Homo sapiens
gagggatccggcggcggc

SEQ ID NO: 4582 - DNA, 18 bp, Homo sapiens
gctgttcacggcctcgcc

SEQ ID NO: 4583 - DNA, 22 bp, Homo sapiens
gctcgctcgcagcctcctcgcc

SEQ ID NO: 4584 - DNA, 20 bp, Homo sapiens
gcttgctcaggccgtgggcc

SEQ ID NO: 4585 - DNA, 18 bp, Homo sapiens
gcctgctctgctcctcac

SEQ ID NO: 4586 - DNA, 22 bp, Homo sapiens
gcttgtgtagagccccctcacc

SEQ ID NO: 4587 - DNA, 22 bp, Homo sapiens
gcttgctcatgtcctctttgcc

SEQ ID NO: 4588 - DNA, 21 bp, Homo sapiens
gcctgctcgtggcgggatcct

SEQ ID NO: 4589 - DNA, 18 bp, Homo sapiens
gcttgcccggctcccttc

SEQ ID NO: 4590 - DNA, 20 bp, Homo sapiens
gctcgctccctctgcctctc

SEQ ID NO: 4591 - DNA, 20 bp, Homo sapiens
gcttgctcacgcagcttgcc

SEQ ID NO: 4592 - DNA, 18 bp, Homo sapiens
cttgctcatggccatgcc

SEQ ID NO: 4593 - DNA, 16 bp, Homo sapiens
gctcgctcaagtccct

SEQ ID NO: 4594 - DNA, 21 bp, Homo sapiens
gctcgctcgctggctctcgcc

SEQ ID NO: 4595 - DNA, 21 bp, Homo sapiens
gcttgctcctggccggggacc

SEQ ID NO: 4596 - DNA, 98 bp, Alcelaphine herpesvirus 1
cccgccaagtgagctccgcccacccagcccccaccctcatctcgggcccgggggcgggcagacgggggtgggggctgggtgggcggagctcactcggg

SEQ ID NO: 4597 - DNA, 24 bp, Alcelaphine herpesvirus 1
agacgggggtgggggctgggtggg

SEQ ID NO: 4598 - DNA, 24 bp, Alcelaphine herpesvirus 1
caagtgagctccgcccacccagcc

SEQ ID NO: 4599 - DNA, 19 bp, Homo sapiens
gggggccaagctgggtggg

SEQ ID NO: 4600 - DNA, 16 bp, Homo sapiens
cgggggacctgggtgg

SEQ ID NO: 4601 - DNA, 18 bp, Homo sapiens
aggcgggggtgggagttg

SEQ ID NO: 4602 - DNA, 18 bp, Homo sapiens
gatgggggtggggaaggg

SEQ ID NO: 4603 - DNA, 20 bp, Homo sapiens
ggggatgggatgggggtggg

SEQ ID NO: 4604 - DNA, 18 bp, Homo sapiens
aggcgggggtgggctggg

SEQ ID NO: 4605 - DNA, 18 bp, Homo sapiens
gggcgggggggcgggtgg

SEQ ID NO: 4606 - DNA, 21 bp, Homo sapiens
gatgggagtgggcagggtggg

SEQ ID NO: 4607 - DNA, 18 bp, Homo sapiens
acgggggtgggggcaggg

SEQ ID NO: 4608 - DNA, 19 bp, Homo sapiens
gggtggggtggcatggtgg

SEQ ID NO: 4609 - DNA, 18 bp, Homo sapiens
gggttgggagctgggtgg

SEQ ID NO: 4610 - DNA, 22 bp, Homo sapiens
aggcgtggggtgggaaagtggg

SEQ ID NO: 4611 - DNA, 18 bp, Homo sapiens
agacggggtgggggtgcg

SEQ ID NO: 4612 - DNA, 17 bp, Homo sapiens
agatggggggggggggg

SEQ ID NO: 4613 - DNA, 21 bp, Homo sapiens
gggcgaggggtgcagggtggg

SEQ ID NO: 4614 - DNA, 21 bp, Homo sapiens
gatgggggtggtggtggtggg

SEQ ID NO: 4615 - DNA, 18 bp, Homo sapiens
agagggggtggaggtggg

SEQ ID NO: 4616 - DNA, 18 bp, Homo sapiens
ggggtggggaggggtggg

SEQ ID NO: 4617 - DNA, 19 bp, Homo sapiens
gggggtgggtcagggtggg

SEQ ID NO: 4618 - DNA, 18 bp, Homo sapiens
gggtggggggtggggtgg

SEQ ID NO: 4619 - DNA, 19 bp, Homo sapiens
ggggtggggaggtggtggg

SEQ ID NO: 4620 - DNA, 16 bp, Homo sapiens
gggtggggctgggggg

SEQ ID NO: 4621 - DNA, 22 bp, Homo sapiens
agatgggggtgctgggggtggg

SEQ ID NO: 4622 - DNA, 19 bp, Homo sapiens
ggggtggggcaggagtggg

SEQ ID NO: 4623 - DNA, 19 bp, Homo sapiens
aggcggcggtgggggaggg

SEQ ID NO: 4624 - DNA, 21 bp, Homo sapiens
cgggggcgggggcgttcccgg

SEQ ID NO: 4625 - DNA, 21 bp, Homo sapiens
aggggtgggggcagtgatggg

SEQ ID NO: 4626 - DNA, 22 bp, Homo sapiens
aggcgggagtgggggtgacagg

SEQ ID NO: 4627 - DNA, 23 bp, Homo sapiens
cgggggtgggggtcctaggtggg

SEQ ID NO: 4628 - DNA, 20 bp, Homo sapiens
gggggttggggctgggtggg

SEQ ID NO: 4629 - DNA, 20 bp, Homo sapiens
cgggggcgggggccgccggg

SEQ ID NO: 4630 - DNA, 19 bp, Homo sapiens
ggggtgggggtgggggtgg

SEQ ID NO: 4631 - DNA, 17 bp, Homo sapiens
ggggtgggaaaggtggg

SEQ ID NO: 4632 - DNA, 18 bp, Homo sapiens
gacggggtggagggtggg

SEQ ID NO: 4633 - DNA, 20 bp, Homo sapiens
gacggggtgggaggggtggg

SEQ ID NO: 4634 - DNA, 18 bp, Homo sapiens
aggcgggggtgggggggg

SEQ ID NO: 4635 - DNA, 19 bp, Homo sapiens
gatgggggtggaggctggg

SEQ ID NO: 4636 - DNA, 18 bp, Homo sapiens
ggggtggggtggagtggg

SEQ ID NO: 4637 - DNA, 18 bp, Homo sapiens
ggggtggagtggggtggg

SEQ ID NO: 4638 - DNA, 21 bp, Homo sapiens
gggggtggggtgaggggtggg

SEQ ID NO: 4639 - DNA, 18 bp, Homo sapiens
gaagggggtggggctggg

SEQ ID NO: 4640 - DNA, 18 bp, Homo sapiens
gggggtggggggattggg

SEQ ID NO: 4641 - DNA, 15 bp, Homo sapiens
gggggtggaaggtgg

SEQ ID NO: 4642 - DNA, 24 bp, Homo sapiens
gatgggggttgggggtcgggtggg

SEQ ID NO: 4643 - DNA, 21 bp, Homo sapiens
gggggcgggggtgtcccaggg

SEQ ID NO: 4644 - DNA, 19 bp, Homo sapiens
cggggcgtgggggtgaggg

SEQ ID NO: 4645 - DNA, 15 bp, Homo sapiens
gggggtgggtagtgg

SEQ ID NO: 4646 - DNA, 18 bp, Homo sapiens
ggaggtgcagggggtggg

SEQ ID NO: 4647 - DNA, 22 bp, Homo sapiens
gggggtggggagggcaggtggg

SEQ ID NO: 4648 - DNA, 21 bp, Homo sapiens
gggcagggggccttgggtggg

SEQ ID NO: 4649 - DNA, 22 bp, Homo sapiens
gattggggtgggggtagttggg

SEQ ID NO: 4650 - DNA, 19 bp, Homo sapiens
agaagggggtggaggtggg

SEQ ID NO: 4651 - DNA, 19 bp, Homo sapiens
agacgggggctgggggctg

SEQ ID NO: 4652 - DNA, 20 bp, Homo sapiens
gggggtgcgggctccacagg

SEQ ID NO: 4653 - DNA, 22 bp, Homo sapiens
aggcggggctgggggcggtggg

SEQ ID NO: 4654 - DNA, 20 bp, Homo sapiens
cgggggtggggatgcatggg

SEQ ID NO: 4655 - DNA, 23 bp, Homo sapiens
cagtaggtagggggctgggtggg

SEQ ID NO: 4656 - DNA, 17 bp, Homo sapiens
ggggtgggggctctggg

SEQ ID NO: 4657 - DNA, 18 bp, Homo sapiens
ggggggaaggtgggtggg

SEQ ID NO: 4658 - DNA, 19 bp, Homo sapiens
gggatgggggtgtgggtgg

SEQ ID NO: 4659 - DNA, 20 bp, Homo sapiens
ggggcctgtggttgggtggg

SEQ ID NO: 4660 - DNA, 20 bp, Homo sapiens
aggcggggggggggttcagg

SEQ ID NO: 4661 - DNA, 20 bp, Homo sapiens
ggggtgggattgggggtggg

SEQ ID NO: 4662 - DNA, 21 bp, Homo sapiens
cgggggtgggggcagctcggg

SEQ ID NO: 4663 - DNA, 19 bp, Homo sapiens
agatgggggtggcgggcgg

SEQ ID NO: 4664 - DNA, 21 bp, Homo sapiens
gggggtggagggccagctggg

SEQ ID NO: 4665 - DNA, 22 bp, Homo sapiens
gggtggggtgggcaagggtggg

SEQ ID NO: 4666 - DNA, 18 bp, Homo sapiens
ggggtgggggtggggtgg

SEQ ID NO: 4667 - DNA, 15 bp, Homo sapiens
ggggtgagggggtgg

SEQ ID NO: 4668 - DNA, 18 bp, Homo sapiens
gggggtgggggtttcatg

SEQ ID NO: 4669 - DNA, 20 bp, Homo sapiens
gaggggcagggctgggtggg

SEQ ID NO: 4670 - DNA, 19 bp, Homo sapiens
gggtgggggtggtgagtgg

SEQ ID NO: 4671 - DNA, 21 bp, Homo sapiens
agaagggggtgagggggtggg

SEQ ID NO: 4672 - DNA, 17 bp, Homo sapiens
aggtgggggctgggggg

SEQ ID NO: 4673 - DNA, 21 bp, Homo sapiens
gggtgggggctgggggttggg

SEQ ID NO: 4674 - DNA, 20 bp, Homo sapiens
gagggtggggaggacctggg

SEQ ID NO: 4675 - DNA, 23 bp, Homo sapiens
gggggtggcgggtactgagtggg

SEQ ID NO: 4676 - DNA, 27 bp, Homo sapiens
agatgggggtgggaggctgtcagtggg

SEQ ID NO: 4677 - DNA, 17 bp, Homo sapiens
ggggtgggagctgtggg

SEQ ID NO: 4678 - DNA, 18 bp, Homo sapiens
gggtggggctgagggtgg

SEQ ID NO: 4679 - DNA, 19 bp, Homo sapiens
caggggtggggggggtggg

SEQ ID NO: 4680 - DNA, 16 bp, Homo sapiens
gggggtgggggggcgg

SEQ ID NO: 4681 - DNA, 17 bp, Homo sapiens
gcgtgcgctcacccagc

SEQ ID NO: 4682 - DNA, 21 bp, Homo sapiens
gtgctgcccgcccacctggcc

SEQ ID NO: 4683 - DNA, 19 bp, Homo sapiens
caggtggctcttcccggcc

SEQ ID NO: 4684 - DNA, 19 bp, Homo sapiens
tgagtgaactccactcagc

SEQ ID NO: 4685 - DNA, 22 bp, Homo sapiens
caaggtggcgccccacccagcc

SEQ ID NO: 4686 - DNA, 14 bp, Homo sapiens
gtgccgcccacccg

SEQ ID NO: 4687 - DNA, 23 bp, Homo sapiens
caaatgagcagtccccacccagc

SEQ ID NO: 4688 - DNA, 17 bp, Homo sapiens
atgggctccgccttcag

SEQ ID NO: 4689 - DNA, 22 bp, Homo sapiens
caagtgagttcctaaccccggc

SEQ ID NO: 4690 - DNA, 19 bp, Homo sapiens
atgagtggcctcacccagc

SEQ ID NO: 4691 - DNA, 18 bp, Homo sapiens
gcattctgcccacccagc

SEQ ID NO: 4692 - DNA, 24 bp, Homo sapiens
tgagtgatgtggggatacccagcc

SEQ ID NO: 4693 - DNA, 17 bp, Homo sapiens
gtgagctcccccatggc

SEQ ID NO: 4694 - DNA, 20 bp, Homo sapiens
caagtgagtccgctcctcag

SEQ ID NO: 4695 - DNA, 18 bp, Homo sapiens
gtgagctccgacaccggc

SEQ ID NO: 4696 - DNA, 20 bp, Homo sapiens
atgagcccgtccgctcggcc

SEQ ID NO: 4697 - DNA, 16 bp, Homo sapiens
gtggcctccacccggc

SEQ ID NO: 4698 - DNA, 22 bp, Homo sapiens
caagtgatctgcccattcggcc

SEQ ID NO: 4699 - DNA, 18 bp, Homo sapiens
aggacgctccgcctggcc

SEQ ID NO: 4700 - DNA, 26 bp, Homo sapiens
aagtgagctttgggtataacttagcc

SEQ ID NO: 4701 - DNA, 63 bp, Alcelaphine herpesvirus 1
ggcgtgtcgcgctcgctcgcccgggcggttcatccgcttcggctttaggcagccgcggccgcc

SEQ ID NO: 4702 - DNA, 17 bp, Alcelaphine herpesvirus 1
aggcagccgcggccgcc

SEQ ID NO: 4703 - DNA, 24 bp, Alcelaphine herpesvirus 1
gctcgctcgcccgggcggttcatc

SEQ ID NO: 4704 - DNA, 18 bp, Homo sapiens
aggcagcctcacggccgc

SEQ ID NO: 4705 - DNA, 18 bp, Homo sapiens
aggtgcccgggacccgcc

SEQ ID NO: 4706 - DNA, 18 bp, Homo sapiens
agcagccacggagccgcc

SEQ ID NO: 4707 - DNA, 19 bp, Homo sapiens
ggcagccagtccggtcgcc

SEQ ID NO: 4708 - DNA, 18 bp, Homo sapiens
agacagccaatgactgcc

SEQ ID NO: 4709 - DNA, 18 bp, Homo sapiens
agcagccagggacccgcc

SEQ ID NO: 4710 - DNA, 19 bp, Homo sapiens
aggcagccttagcagttgc

SEQ ID NO: 4711 - DNA, 18 bp, Homo sapiens
gcaccggccgcggccgcc

SEQ ID NO: 4712 - DNA, 18 bp, Homo sapiens
agccagctgctagctgcc

SEQ ID NO: 4713 - DNA, 19 bp, Homo sapiens
ggcagccggagcagctgcc

SEQ ID NO: 4714 - DNA, 20 bp, Homo sapiens
ggtcagccacgcaggctgcc

SEQ ID NO: 4715 - DNA, 19 bp, Homo sapiens
ggcagccgcactggccgcc

SEQ ID NO: 4716 - DNA, 18 bp, Homo sapiens
ggcagccaattcagctgc

SEQ ID NO: 4717 - DNA, 19 bp, Homo sapiens
aggcgaccacaggggccgc

SEQ ID NO: 4718 - DNA, 16 bp, Homo sapiens
gcagccgcggccgccg

SEQ ID NO: 4719 - DNA, 17 bp, Homo sapiens
agccgccgcggccgccg

SEQ ID NO: 4720 - DNA, 19 bp, Homo sapiens
agccagccgcagcatctgc

SEQ ID NO: 4721 - DNA, 23 bp, Homo sapiens
aggcagcccccccaaggctgccg

SEQ ID NO: 4722 - DNA, 18 bp, Homo sapiens
ggcaccgcagcggccgcc

SEQ ID NO: 4723 - DNA, 18 bp, Homo sapiens
aggaagccgcggcaggcc

SEQ ID NO: 4724 - DNA, 21 bp, Homo sapiens
gctgcttgctgcaggttcatc

SEQ ID NO: 4725 - DNA, 16 bp, Homo sapiens
tcgctcgcctgcgctc

SEQ ID NO: 4726 - DNA, 22 bp, Homo sapiens
gctcgctcggccgctgctcgtc

SEQ ID NO: 4727 - DNA, 64 bp, Alcelaphine herpesvirus 1
ggccacatgtgcggtatgggggtcgactatcaaaacgtggccctgacgctgacttacaacggcc

SEQ ID NO: 4728 - DNA, 21 bp, Alcelaphine herpesvirus 1
tgacgctgacttacaacggcc

SEQ ID NO: 4729 - DNA, 24 bp, Alcelaphine herpesvirus 1
acatgtgcggtatgggggtcgact

SEQ ID NO: 4730 - DNA, 16 bp, Homo sapiens
tgattctgacccacgg

SEQ ID NO: 4731 - DNA, 22 bp, Homo sapiens
taacgctgacgagacggtggcc

SEQ ID NO: 4732 - DNA, 16 bp, Homo sapiens
tggcactgactccggc

SEQ ID NO: 4733 - DNA, 19 bp, Homo sapiens
tgagcagattgcaacggcc

SEQ ID NO: 4734 - DNA, 19 bp, Homo sapiens
tgacgctaacgggggcggc

SEQ ID NO: 4735 - DNA, 19 bp, Homo sapiens
tgacgctggcctcagagcc

SEQ ID NO: 4736 - DNA, 16 bp, Homo sapiens
tgagctgacttcagcc

SEQ ID NO: 4737 - DNA, 20 bp, Homo sapiens
tgacgctgcttccacgggcc

SEQ ID NO: 4738 - DNA, 19 bp, Homo sapiens
tgacatggatacaacggcc

SEQ ID NO: 4739 - DNA, 20 bp, Homo sapiens
tgaccttggctaccttggcc

SEQ ID NO: 4740 - DNA, 18 bp, Homo sapiens
tgacttgtagcaacggcc

SEQ ID NO: 4741 - DNA, 19 bp, Homo sapiens
tgacgctggaccacttggc

SEQ ID NO: 4742 - DNA, 18 bp, Homo sapiens
tgagctgggctcagacgg

SEQ ID NO: 4743 - DNA, 16 bp, Homo sapiens
tgtgtgaagggttgac

SEQ ID NO: 4744 - DNA, 18 bp, Homo sapiens
acatgtgcggtgtctggt

SEQ ID NO: 4745 - DNA, 65 bp, Alcelaphine herpesvirus 1
cctccagtacgtcgtggtcaacggtacagacgtgtttttggaccagccttgccatatgctgcagg

SEQ ID NO: 4746 - DNA, 24 bp, Alcelaphine herpesvirus 1
tccagtacgtcgtggtcaacggta

SEQ ID NO: 4747 - DNA, 24 bp, Alcelaphine herpesvirus 1
gaccagccttgccatatgctgcag

SEQ ID NO: 4748 - DNA, 18 bp, Homo sapiens
agcccgcatgtgctgcag

SEQ ID NO: 4749 - DNA, 14 bp, Homo sapiens
gccttcatgctgca

SEQ ID NO: 4750 - DNA, 20 bp, Homo sapiens
ccagcccttgccatgagcag

SEQ ID NO: 4751 - DNA, 19 bp, Homo sapiens
gactaattttgccatactg

SEQ ID NO: 4752 - DNA, 17 bp, Homo sapiens
aaccttgaatgctgcag

SEQ ID NO: 4753 - DNA, 18 bp, Homo sapiens
ccagcctggccatgctgc

SEQ ID NO: 4754 - DNA, 22 bp, Homo sapiens
ccagctttggctgacgctgcag

SEQ ID NO: 4755 - DNA, 19 bp, Homo sapiens
gaccagcctggccaatgtg

SEQ ID NO: 4756 - DNA, 14 bp, Homo sapiens
ccaccttgcactgc

SEQ ID NO: 4757 - DNA, 18 bp, Homo sapiens
gaccggcctcgccctgca

SEQ ID NO: 4758 - DNA, 23 bp, Homo sapiens
cctggccttgcctgcctttgcag

SEQ ID NO: 4759 - DNA, 15 bp, Homo sapiens
gccttgccactgcag

SEQ ID NO: 4760 - DNA, 18 bp, Homo sapiens
gactgatcctatatgctg

SEQ ID NO: 4761 - DNA, 18 bp, Homo sapiens
agcttttctcatatgctg

SEQ ID NO: 4762 - DNA, 16 bp, Homo sapiens
aaccagccttctgctg

SEQ ID NO: 4763 - DNA, 82 bp, Alcelaphine herpesvirus 1
gcttgctttggcccgccttgcgcttttgcatttggctcgcccctgcccggtttaatttgcatagccccctggcccgcagtgc

SEQ ID NO: 4764 - DNA, 21 bp, Alcelaphine herpesvirus 1
tagccccctggcccgcagtgc

SEQ ID NO: 4765 - DNA, 24 bp, Alcelaphine herpesvirus 1
tttggcccgccttgcgcttttgca

SEQ ID NO: 4766 - DNA, 18 bp, Homo sapiens
cagccaagccccgcagtg

SEQ ID NO: 4767 - DNA, 22 bp, Homo sapiens
acccaacccgggcccgtggtgc

SEQ ID NO: 4768 - DNA, 15 bp, Homo sapiens
tagcccctggccgtg

SEQ ID NO: 4769 - DNA, 18 bp, Homo sapiens
gctctcctggcccccagc

SEQ ID NO: 4770 - DNA, 19 bp, Homo sapiens
cagcccaccttctgcagtg

SEQ ID NO: 4771 - DNA, 16 bp, Homo sapiens
gccatctggcccgtgc

SEQ ID NO: 4772 - DNA, 18 bp, Homo sapiens
cagcccactccgcggtgc

SEQ ID NO: 4773 - DNA, 19 bp, Homo sapiens
gcgccccagcccgcggtgc

SEQ ID NO: 4774 - DNA, 22 bp, Homo sapiens
cagcccaaaatgtccgtagtgc

SEQ ID NO: 4775 - DNA, 18 bp, Homo sapiens
gcccactagctgcggtgc

SEQ ID NO: 4776 - DNA, 18 bp, Homo sapiens
agcccgcagccgcggtgc

SEQ ID NO: 4777 - DNA, 15 bp, Homo sapiens
gctcccctggcagtg

SEQ ID NO: 4778 - DNA, 17 bp, Homo sapiens
gcccctttgcgcagtgc

SEQ ID NO: 4779 - DNA, 19 bp, Homo sapiens
cagcctcctggcccgcggc

SEQ ID NO: 4780 - DNA, 19 bp, Homo sapiens
taacccctccctgtggtgc

SEQ ID NO: 4781 - DNA, 26 bp, Homo sapiens
cagccccgcagccctggcctgtagtg

SEQ ID NO: 4782 - DNA, 18 bp, Homo sapiens
gccctctggcccgagagc

SEQ ID NO: 4783 - DNA, 18 bp, Homo sapiens
agtcccttggtccgcagt

SEQ ID NO: 4784 - DNA, 18 bp, Homo sapiens
tagccctctgtgcttcaa

SEQ ID NO: 4785 - DNA, 20 bp, Homo sapiens
agcccccttgcggcgcggtg

SEQ ID NO: 4786 - DNA, 19 bp, Homo sapiens
agctccgcatgcgcagtgc

SEQ ID NO: 4787 - DNA, 19 bp, Homo sapiens
cagctccctggccaccagc

SEQ ID NO: 4788 - DNA, 17 bp, Homo sapiens
agccctctggggcgtgc

SEQ ID NO: 4789 - DNA, 14 bp, Homo sapiens
gccccctgggcgtg

SEQ ID NO: 4790 - DNA, 20 bp, Homo sapiens
cagccccctgcagcctggtg

SEQ ID NO: 4791 - DNA, 17 bp, Homo sapiens
gccgccctggccgcctg

SEQ ID NO: 4792 - DNA, 15 bp, Homo sapiens
gcccacctagcagtg

SEQ ID NO: 4793 - DNA, 20 bp, Homo sapiens
tagcttccagcggcaggtgc

SEQ ID NO: 4794 - DNA, 16 bp, Homo sapiens
agccccctcccatgtg

SEQ ID NO: 4795 - DNA, 18 bp, Homo sapiens
gctccctggcctccaggc

SEQ ID NO: 4796 - DNA, 18 bp, Homo sapiens
tagccccccggcccatgc

SEQ ID NO: 4797 - DNA, 21 bp, Homo sapiens
cagccctcttcagctgcagtg

SEQ ID NO: 4798 - DNA, 22 bp, Homo sapiens
gcccaccccggccctcgcggtg

SEQ ID NO: 4799 - DNA, 16 bp, Homo sapiens
tagcccttaggcactg

SEQ ID NO: 4800 - DNA, 18 bp, Homo sapiens
gctcggcccctgcagtgc

SEQ ID NO: 4801 - DNA, 18 bp, Homo sapiens
tagccccctagcctgggc

SEQ ID NO: 4802 - DNA, 18 bp, Homo sapiens
gcgtcggcctcgcagtgc

SEQ ID NO: 4803 - DNA, 18 bp, Homo sapiens
tggcctgctccttttgca

SEQ ID NO: 4804 - DNA, 80 bp, Vaccinia virus
tccctgcttgctcaccgccggggtcctcccgccaatcgcgaaagggagaagggtgaggggcggccgtgagcaagcaggga

SEQ ID NO: 4805 - DNA, 24 bp, Vaccinia virus
gcttgctcaccgccggggtcctcc

SEQ ID NO: 4806 - DNA, 24 bp, Vaccinia virus
tgaggggcggccgtgagcaagcag

SEQ ID NO: 4807 - DNA, 21 bp, Homo sapiens
ttgctcacagctttattcctc

SEQ ID NO: 4808 - DNA, 19 bp, Homo sapiens
gcctgctcactggcttctc

SEQ ID NO: 4809 - DNA, 18 bp, Homo sapiens
gctgctcacttggttgtc

SEQ ID NO: 4810 - DNA, 19 bp, Homo sapiens
ttcctcattcaagtcctcc

SEQ ID NO: 4811 - DNA, 20 bp, Homo sapiens
gctcgctcactgctggccgg

SEQ ID NO: 4812 - DNA, 18 bp, Homo sapiens
gcttgctcgctccgggat

SEQ ID NO: 4813 - DNA, 20 bp, Homo sapiens
cttgctcaggcagggtcctc

SEQ ID NO: 4814 - DNA, 26 bp, Homo sapiens
gcctgctcgccgctctgggcgtcctc

SEQ ID NO: 4815 - DNA, 24 bp, Homo sapiens
cttgctcactgctctccggaggac

SEQ ID NO: 4816 - DNA, 20 bp, Homo sapiens
gcttgctcgctcccagctcc

SEQ ID NO: 4817 - DNA, 20 bp, Homo sapiens
gcttgctcactcttgcatcc

SEQ ID NO: 4818 - DNA, 15 bp, Homo sapiens
gctggctggggtcct

SEQ ID NO: 4819 - DNA, 19 bp, Homo sapiens
gctcgctcgctgttgactc

SEQ ID NO: 4820 - DNA, 19 bp, Homo sapiens
tgagaggcaggggcaggtg

SEQ ID NO: 4821 - DNA, 18 bp, Homo sapiens
tgcggggcggccgcgggc

SEQ ID NO: 4822 - DNA, 16 bp, Homo sapiens
tgaggggcgactagca

SEQ ID NO: 4823 - DNA, 20 bp, Homo sapiens
aggggcttgggagcaagcag

SEQ ID NO: 4824 - DNA, 22 bp, Homo sapiens
tgggtggtggccgggcaagcag

SEQ ID NO: 4825 - DNA, 21 bp, Homo sapiens
tgaggggcgcctggacacggc

SEQ ID NO: 4826 - DNA, 17 bp, Homo sapiens
tgaggggtggctgggca

SEQ ID NO: 4827 - DNA, 18 bp, Homo sapiens
gcagagccgtgagcaagc

SEQ ID NO: 4828 - DNA, 19 bp, Homo sapiens
gaggggcggctggactggc

SEQ ID NO: 4829 - DNA, 22 bp, Homo sapiens
tgggggcggccggcctgggcag

SEQ ID NO: 4830 - DNA, 18 bp, Homo sapiens
tgaggggctgctgaagca

SEQ ID NO: 4831 - DNA, 19 bp, Homo sapiens
gaggggcaggcgggcaggc

SEQ ID NO: 4832 - DNA, 18 bp, Homo sapiens
tgaggggagctggcgagc

SEQ ID NO: 4833 - DNA, 21 bp, Homo sapiens
tgggggacgggaagcaagcag

SEQ ID NO: 4834 - DNA, 22 bp, Homo sapiens
gaggggcggccggggccggcag

SEQ ID NO: 4835 - DNA, 15 bp, Homo sapiens
ggggggcggtgaggc

SEQ ID NO: 4836 - DNA, 22 bp, Homo sapiens
gggggtgccaaggagcaggcag

SEQ ID NO: 4837 - DNA, 20 bp, Homo sapiens
tgagaggcacactgagcaag

SEQ ID NO: 4838 - DNA, 21 bp, Homo sapiens
tgggggcggctgttgaggcag

SEQ ID NO: 4839 - DNA, 23 bp, Homo sapiens
gaaatgtggctgtgagcaagcag

SEQ ID NO: 4840 - DNA, 19 bp, Homo sapiens
tgaggggtggccacaaggc

SEQ ID NO: 4841 - DNA, 16 bp, Homo sapiens
tgaggggcgactgggc

SEQ ID NO: 4842 - DNA, 18 bp, Homo sapiens
ggagcctgtgggcaggca

SEQ ID NO: 4843 - DNA, 22 bp, Homo sapiens
tgaggcggcggcggcgcgggca

SEQ ID NO: 4844 - DNA, 19 bp, Homo sapiens
cggggggcggcggtcaggc

SEQ ID NO: 4845 - DNA, 16 bp, Homo sapiens
gggcggcgcaccaggc

SEQ ID NO: 4846 - DNA, 20 bp, Homo sapiens
tgaggggtgtcggccgagag

SEQ ID NO: 4847 - DNA, 73 bp, Vaccinia virus
gggaaagagaaggaggggaaggggaaggagaaggcgccgcactgccgcccgctcccggcccgccgtccgtccc

SEQ ID NO: 4848 - DNA, 24 bp, Vaccinia virus
aggggaaggagaaggcgccgcact

SEQ ID NO: 4849 - DNA, 23 bp, Vaccinia virus
gctcccggcccgccgtccgtccc

SEQ ID NO: 4850 - DNA, 19 bp, Homo sapiens
ggggaaagaggtgatgtgc

SEQ ID NO: 4851 - DNA, 22 bp, Homo sapiens
ggggaagggggggcacgaaggc

SEQ ID NO: 4852 - DNA, 19 bp, Homo sapiens
aggggcgggagggctgtgc

SEQ ID NO: 4853 - DNA, 18 bp, Homo sapiens
aggggaaggggagagccc

SEQ ID NO: 4854 - DNA, 17 bp, Homo sapiens
aagggagggagggggac

SEQ ID NO: 4855 - DNA, 21 bp, Homo sapiens
ggggtagggagaagagaccac

SEQ ID NO: 4856 - DNA, 21 bp, Homo sapiens
gggagggagaaggaggcatgc

SEQ ID NO: 4857 - DNA, 25 bp, Homo sapiens
aggggtgaggagggggcttaactgc

SEQ ID NO: 4858 - DNA, 26 bp, Homo sapiens
agggaagggggaggtgtgaaacgtgc

SEQ ID NO: 4859 - DNA, 23 bp, Homo sapiens
aggggaggagaagttgcctgtgc

SEQ ID NO: 4860 - DNA, 18 bp, Homo sapiens
aggggaagggagaggtgc

SEQ ID NO: 4861 - DNA, 21 bp, Homo sapiens
ggggaaggggggggccatacc

SEQ ID NO: 4862 - DNA, 15 bp, Homo sapiens
ggggaaggggaagcc

SEQ ID NO: 4863 - DNA, 21 bp, Homo sapiens
aggggaggggggaggctgggc

SEQ ID NO: 4864 - DNA, 22 bp, Homo sapiens
aggagaaggggaggggggaggc

SEQ ID NO: 4865 - DNA, 16 bp, Homo sapiens
agggaagggctccagc

SEQ ID NO: 4866 - DNA, 22 bp, Homo sapiens
ggggagggggcccggccgcact

SEQ ID NO: 4867 - DNA, 22 bp, Homo sapiens
aggggaaggaaaaagatgcact

SEQ ID NO: 4868 - DNA, 20 bp, Homo sapiens
ggggaaggggcgggcgatgc

SEQ ID NO: 4869 - DNA, 18 bp, Homo sapiens
ggggaaggggaggagaca

SEQ ID NO: 4870 - DNA, 20 bp, Homo sapiens
ggggaaggtgaaggctgggc

SEQ ID NO: 4871 - DNA, 18 bp, Homo sapiens
ggggaagggaaaggttgc

SEQ ID NO: 4872 - DNA, 17 bp, Homo sapiens
aagggagggaggagggc

SEQ ID NO: 4873 - DNA, 19 bp, Homo sapiens
ggggaaggagagcgcgggc

SEQ ID NO: 4874 - DNA, 18 bp, Homo sapiens
gaggagaggaggaggcgc

SEQ ID NO: 4875 - DNA, 22 bp, Homo sapiens
agggaggaggagaggccgcgct

SEQ ID NO: 4876 - DNA, 17 bp, Homo sapiens
aggggaagggacgtgca

SEQ ID NO: 4877 - DNA, 17 bp, Homo sapiens
ggaaggagaagggaggc

SEQ ID NO: 4878 - DNA, 18 bp, Homo sapiens
ggtggaaggaggccgcac

SEQ ID NO: 4879 - DNA, 18 bp, Homo sapiens
aggggaaggaggaggtgc

SEQ ID NO: 4880 - DNA, 18 bp, Homo sapiens
aggggagtgggaaggcgc

SEQ ID NO: 4881 - DNA, 21 bp, Homo sapiens
aggaggagccggcgccgcgct

SEQ ID NO: 4882 - DNA, 17 bp, Homo sapiens
aggggaaggagagctgc

SEQ ID NO: 4883 - DNA, 21 bp, Homo sapiens
aggggaagcaggagcggcact

SEQ ID NO: 4884 - DNA, 22 bp, Homo sapiens
aggggaggggaaaggatgatgc

SEQ ID NO: 4885 - DNA, 16 bp, Homo sapiens
aggggagggggcgggc

SEQ ID NO: 4886 - DNA, 19 bp, Homo sapiens
aggggggaggatggcgcgc

SEQ ID NO: 4887 - DNA, 19 bp, Homo sapiens
aggggtgggggaagcacca

SEQ ID NO: 4888 - DNA, 18 bp, Homo sapiens
ggggaaggagggggatcc

SEQ ID NO: 4889 - DNA, 20 bp, Homo sapiens
agggaggaggaggaaggggc

SEQ ID NO: 4890 - DNA, 19 bp, Homo sapiens
aggagaaggggaagcgcca

SEQ ID NO: 4891 - DNA, 17 bp, Homo sapiens
ggggaagggcgggctgc

SEQ ID NO: 4892 - DNA, 22 bp, Homo sapiens
ggggaaggggggagggatagca

SEQ ID NO: 4893 - DNA, 18 bp, Homo sapiens
ggggagaggagaaggggc

SEQ ID NO: 4894 - DNA, 18 bp, Homo sapiens
aggggaaggaggggggcg

SEQ ID NO: 4895 - DNA, 15 bp, Homo sapiens
aggcgagggggccgc

SEQ ID NO: 4896 - DNA, 18 bp, Homo sapiens
ggggcagggagagggccc

SEQ ID NO: 4897 - DNA, 18 bp, Homo sapiens
aggggaaggggaggccac

SEQ ID NO: 4898 - DNA, 17 bp, Homo sapiens
ggggaaggggaagggcc

SEQ ID NO: 4899 - DNA, 18 bp, Homo sapiens
ggggaaggggcgggcgcc

SEQ ID NO: 4900 - DNA, 18 bp, Homo sapiens
gctcccagttcgctctgc

SEQ ID NO: 4901 - DNA, 24 bp, Homo sapiens
gccccggcccgcgtgcgcccgtcc

SEQ ID NO: 4902 - DNA, 19 bp, Homo sapiens
gctcccggccccgtctgcc

SEQ ID NO: 4903 - DNA, 24 bp, Homo sapiens
gctcccaggttccagccctgtccc

SEQ ID NO: 4904 - DNA, 24 bp, Homo sapiens
gctcccggcgccgcgagaacttcc

SEQ ID NO: 4905 - DNA, 17 bp, Homo sapiens
gccccggtccgttgccc

SEQ ID NO: 4906 - DNA, 18 bp, Homo sapiens
gctcccggccacgcgtcc

SEQ ID NO: 4907 - DNA, 19 bp, Homo sapiens
gctcccggctcccgcgtcc

SEQ ID NO: 4908 - DNA, 25 bp, Homo sapiens
gcctccggcccgccccgcccgttcc

SEQ ID NO: 4909 - DNA, 19 bp, Homo sapiens
gctcccagcccggccgtcc

SEQ ID NO: 4910 - DNA, 19 bp, Homo sapiens
gctcccggtccgcgcggcc

SEQ ID NO: 4911 - DNA, 20 bp, Homo sapiens
gctcccggccagctggagcc

SEQ ID NO: 4912 - DNA, 17 bp, Homo sapiens
ccgtcccgctccgcgcc

SEQ ID NO: 4913 - DNA, 19 bp, Homo sapiens
gctcccggctccccgccgc

SEQ ID NO: 4914 - DNA, 24 bp, Homo sapiens
gccttggcctgcttgcccctgtcc

SEQ ID NO: 4915 - DNA, 17 bp, Homo sapiens
gctcccggcactgctcc

SEQ ID NO: 4916 - DNA, 19 bp, Homo sapiens
gctctcgctcgccccttcc

SEQ ID NO: 4917 - DNA, 18 bp, Homo sapiens
gctcccggctccgccccc

SEQ ID NO: 4918 - DNA, 21 bp, Homo sapiens
gctcccggctggccagggccc

SEQ ID NO: 4919 - DNA, 19 bp, Homo sapiens
gctcccgcccgcccgggcc

SEQ ID NO: 4920 - DNA, 16 bp, Homo sapiens
ctcccggcctccgtcc

SEQ ID NO: 4921 - DNA, 17 bp, Homo sapiens
cctccccccgtccgtcc

SEQ ID NO: 4922 - DNA, 17 bp, Homo sapiens
gctggcccgcctggccc

SEQ ID NO: 4923 - DNA, 20 bp, Homo sapiens
gctcccggttgcacttgtcc

SEQ ID NO: 4924 - DNA, 18 bp, Homo sapiens
gctcccggctccgctccc

SEQ ID NO: 4925 - DNA, 21 bp, Homo sapiens
gctcccggcttctccgcttcc

SEQ ID NO: 4926 - DNA, 21 bp, Homo sapiens
cttccggcccgcaccagtccc

SEQ ID NO: 4927 - DNA, 20 bp, Homo sapiens
gctcccggctcatccagccc

SEQ ID NO: 4928 - DNA, 18 bp, Homo sapiens
tctcggtcgccgcccgtc

SEQ ID NO: 4929 - DNA, 17 bp, Homo sapiens
gctcccgcccgccggcc

SEQ ID NO: 4930 - DNA, 18 bp, Homo sapiens
gctcctgcccctccgtcc

SEQ ID NO: 4931 - DNA, 22 bp, Homo sapiens
gctcccagtttgtcccaaaccc

SEQ ID NO: 4932 - DNA, 17 bp, Homo sapiens
gctccggcccgccgccc

SEQ ID NO: 4933 - DNA, 17 bp, Homo sapiens
gctcccgtccgccaccc

SEQ ID NO: 4934 - DNA, 17 bp, Homo sapiens
gctttcggcccgctccc

SEQ ID NO: 4935 - DNA, 19 bp, Homo sapiens
gctcccggcttcggtgtcc

SEQ ID NO: 4936 - DNA, 17 bp, Homo sapiens
gccccggcccctcgtcc

SEQ ID NO: 4937 - DNA, 21 bp, Homo sapiens
gcccctggcccgcctgggccc

SEQ ID NO: 4938 - DNA, 24 bp, Homo sapiens
gccccggcccgtccggcccgtccc

SEQ ID NO: 4939 - DNA, 16 bp, Homo sapiens
gctcccggctgcctcc

SEQ ID NO: 4940 - DNA, 17 bp, Homo sapiens
gctcccgcccgccgccc

SEQ ID NO: 4941 - DNA, 19 bp, Homo sapiens
gctcccaggttccacgtcc

SEQ ID NO: 4942 - DNA, 18 bp, Homo sapiens
ccccggcctcgccgttcc

SEQ ID NO: 4943 - DNA, 16 bp, Homo sapiens
gctcccggcccttccc

SEQ ID NO: 4944 - DNA, 19 bp, Homo sapiens
gctcgccggcctcccgtcc

SEQ ID NO: 4945 - DNA, 21 bp, Homo sapiens
gcttcggcccgccggcgtccc

SEQ ID NO: 4946 - DNA, 18 bp, Homo sapiens
gctcccggctgcccggcc

SEQ ID NO: 4947 - DNA, 16 bp, Homo sapiens
gctcccggtcgctccc

SEQ ID NO: 4948 - DNA, 16 bp, Homo sapiens
gctcctgccaccgtcc

SEQ ID NO: 4949 - DNA, 19 bp, Homo sapiens
tccttggcccgccaaaccc

SEQ ID NO: 4950 - DNA, 22 bp, Homo sapiens
gctcccgcccgccggagacgcc

SEQ ID NO: 4951 - DNA, 16 bp, Homo sapiens
gctccggcccgagtcc

SEQ ID NO: 4952 - DNA, 17 bp, Homo sapiens
gcttcccgtccgctccc

SEQ ID NO: 4953 - DNA, 16 bp, Homo sapiens
gccccggcccgccccc

SEQ ID NO: 4954 - DNA, 17 bp, Homo sapiens
gctcccaggctccgtcc

SEQ ID NO: 4955 - DNA, 21 bp, Homo sapiens
gctccggcctgctcggctccc

SEQ ID NO: 4956 - DNA, 18 bp, Homo sapiens
gctcccggtcctccaccc

SEQ ID NO: 4957 - DNA, 20 bp, Homo sapiens
gctcccggccgcctcgtccc

SEQ ID NO: 4958 - DNA, 20 bp, Homo sapiens
gctcccagccgaggcttcgt

SEQ ID NO: 4959 - DNA, 20 bp, Homo sapiens
gctcctgctccgccccggcc

SEQ ID NO: 4960 - DNA, 20 bp, Homo sapiens
gctcccggctccccgatgcc

SEQ ID NO: 4961 - DNA, 22 bp, Homo sapiens
gctcccgtcccgctgtcatccc

SEQ ID NO: 4962 - DNA, 22 bp, Homo sapiens
gctcccagcccccaaccgtccc

SEQ ID NO: 4963 - DNA, 16 bp, Homo sapiens
ctcccgacgtctgtcc

SEQ ID NO: 4964 - DNA, 20 bp, Homo sapiens
gctctcgcccgtcggcgccc

SEQ ID NO: 4965 - DNA, 17 bp, Homo sapiens
gctcttggccgccgccc

SEQ ID NO: 4966 - DNA, 18 bp, Homo sapiens
gctcctgcgcccgctccc

SEQ ID NO: 4967 - DNA, 21 bp, Homo sapiens
gctcccggcggaaactgttcc

SEQ ID NO: 4968 - DNA, 17 bp, Homo sapiens
gctttcggccgcccacc

SEQ ID NO: 4969 - DNA, 20 bp, Homo sapiens
gctcccggccatgcacctcc

SEQ ID NO: 4970 - DNA, 73 bp, Vaccinia virus
cgcataaggcaccgcggctgggcccttcacacaggcaaaagtagggaggcagggccgcggcgagtaatttgcg

SEQ ID NO: 4971 - DNA, 24 bp, Vaccinia virus
taaggcaccgcggctgggcccttc

SEQ ID NO: 4972 - DNA, 24 bp, Vaccinia virus
aggcagggccgcggcgagtaattt

SEQ ID NO: 4973 - DNA, 19 bp, Homo sapiens
ggctggacagaggctcttc

SEQ ID NO: 4974 - DNA, 20 bp, Homo sapiens
agggttcgtgcaggcccttc

SEQ ID NO: 4975 - DNA, 18 bp, Homo sapiens
ggcacggctgggcccttc

SEQ ID NO: 4976 - DNA, 19 bp, Homo sapiens
ggcaccgcccaagcttttc

SEQ ID NO: 4977 - DNA, 15 bp, Homo sapiens
ggcccctgggccttt

SEQ ID NO: 4978 - DNA, 22 bp, Homo sapiens
taaagcaccaacagggctcttc

SEQ ID NO: 4979 - DNA, 16 bp, Homo sapiens
aggtcccagggccctt

SEQ ID NO: 4980 - DNA, 27 bp, Homo sapiens
aggcaccgtggccgctttcgaagggcc

SEQ ID NO: 4981 - DNA, 19 bp, Homo sapiens
taaggtgttcacagccctt

SEQ ID NO: 4982 - DNA, 24 bp, Homo sapiens
taagacactgcctggcagctcttc

SEQ ID NO: 4983 - DNA, 18 bp, Homo sapiens
ggagcattgtgggccctt

SEQ ID NO: 4984 - DNA, 16 bp, Homo sapiens
aagggtgccgggccct

SEQ ID NO: 4985 - DNA, 25 bp, Homo sapiens
aggcaggactgaggaagagtaattt

SEQ ID NO: 4986 - DNA, 20 bp, Homo sapiens
aggcagaggttgtggtgagc

SEQ ID NO: 4987 - DNA, 18 bp, Homo sapiens
aggaagggttaagtaatt

SEQ ID NO: 4988 - DNA, 20 bp, Homo sapiens
aggcagaggttgcggtgagc

SEQ ID NO: 4989 - DNA, 25 bp, Homo sapiens
aggcagagttttgaatgagtaattt

SEQ ID NO: 4990 - DNA, 93 bp, Vaccinia virus
ccgagtgagctccgcccacccagcccccacccccgtctgcccgcccccgggcccgagatgagggtgggggctgggtgggcggagctcacttgg

SEQ ID NO: 4991 - DNA, 24 bp, Vaccinia virus
cgagatgagggtgggggctgggtg

SEQ ID NO: 4992 - DNA, 24 bp, Vaccinia virus
agtgagctccgcccacccagcccc

SEQ ID NO: 4993 - DNA, 21 bp, Homo sapiens
gaggtgggggtgagggggaca

SEQ ID NO: 4994 - DNA, 23 bp, Homo sapiens
gaggcagggtgggggttgggtgc

SEQ ID NO: 4995 - DNA, 20 bp, Homo sapiens
gagggggtgggctggcagtg

SEQ ID NO: 4996 - DNA, 22 bp, Homo sapiens
tgggggtgggggtggaggggtg

SEQ ID NO: 4997 - DNA, 18 bp, Homo sapiens
gaggtgggagtggaggtg

SEQ ID NO: 4998 - DNA, 19 bp, Homo sapiens
gagggggtgggggagagtg

SEQ ID NO: 4999 - DNA, 18 bp, Homo sapiens
gagctgggggtgggggtg

SEQ ID NO: 5000 - DNA, 28 bp, Homo sapiens
cgggctgagggtgggggccacttgggtg

SEQ ID NO: 5001 - DNA, 20 bp, Homo sapiens
agatgggggtgctgggggtg

SEQ ID NO: 5002 - DNA, 23 bp, Homo sapiens
gaggggaggactgaggctgggtg

SEQ ID NO: 5003 - DNA, 18 bp, Homo sapiens
tgggggttggggctgggt

SEQ ID NO: 5004 - DNA, 19 bp, Homo sapiens
cgaggtgaaggtggggatg

SEQ ID NO: 5005 - DNA, 22 bp, Homo sapiens
gaggtagggtggggagaaggtg

SEQ ID NO: 5006 - DNA, 18 bp, Homo sapiens
tggggtgggggtgggggt

SEQ ID NO: 5007 - DNA, 20 bp, Homo sapiens
gagtatgggagggctgggtg

SEQ ID NO: 5008 - DNA, 18 bp, Homo sapiens
tggggtggggtggggatg

SEQ ID NO: 5009 - DNA, 23 bp, Homo sapiens
gagggagggggaagggctgggtg

SEQ ID NO: 5010 - DNA, 25 bp, Homo sapiens
gaggggagggtgggggcatggggtg

SEQ ID NO: 5011 - DNA, 18 bp, Homo sapiens
tgggggtgggagggggtg

SEQ ID NO: 5012 - DNA, 21 bp, Homo sapiens
tgggggtggggggattgggtg

SEQ ID NO: 5013 - DNA, 18 bp, Homo sapiens
cgggggtggggggcggtg

SEQ ID NO: 5014 - DNA, 18 bp, Homo sapiens
ggggtaggggtggaaggt

SEQ ID NO: 5015 - DNA, 19 bp, Homo sapiens
gattggggtggggattctg

SEQ ID NO: 5016 - DNA, 22 bp, Homo sapiens
cgaggtgagggaggtgatggtg

SEQ ID NO: 5017 - DNA, 17 bp, Homo sapiens
gattggggtgggggtag

SEQ ID NO: 5018 - DNA, 20 bp, Homo sapiens
gatgtgggcttggctgggtg

SEQ ID NO: 5019 - DNA, 18 bp, Homo sapiens
tgggatgggggtgtgggt

SEQ ID NO: 5020 - DNA, 23 bp, Homo sapiens
gagatggggttggggggacagtg

SEQ ID NO: 5021 - DNA, 18 bp, Homo sapiens
gagggggtggggaaggtg

SEQ ID NO: 5022 - DNA, 17 bp, Homo sapiens
tggggtgggggcgggtg

SEQ ID NO: 5023 - DNA, 20 bp, Homo sapiens
gagggtggtaaagttgggtg

SEQ ID NO: 5024 - DNA, 21 bp, Homo sapiens
gaggtgggggtggagggccag

SEQ ID NO: 5025 - DNA, 18 bp, Homo sapiens
tgggggtgggggtggggt

SEQ ID NO: 5026 - DNA, 22 bp, Homo sapiens
aggtgaggggcagggctgggtg

SEQ ID NO: 5027 - DNA, 19 bp, Homo sapiens
tggggtgggggtggtgagt

SEQ ID NO: 5028 - DNA, 18 bp, Homo sapiens
tggggtggggtggggggt

SEQ ID NO: 5029 - DNA, 22 bp, Homo sapiens
aggtgagggtggggaggacctg

SEQ ID NO: 5030 - DNA, 18 bp, Homo sapiens
gaggtgagtgtggaggtg

SEQ ID NO: 5031 - DNA, 22 bp, Homo sapiens
tggaggtgggtttggctgggtg

SEQ ID NO: 5032 - DNA, 19 bp, Homo sapiens
ggggtgggggtggcgggta

SEQ ID NO: 5033 - DNA, 18 bp, Homo sapiens
aggatgtgggggctgggt

SEQ ID NO: 5034 - DNA, 22 bp, Homo sapiens
ccagatgagatctggctgggtg

SEQ ID NO: 5035 - DNA, 18 bp, Homo sapiens
tgagggtgcggaggtctg

SEQ ID NO: 5036 - DNA, 19 bp, Homo sapiens
gatgaggagtggagaggtg

SEQ ID NO: 5037 - DNA, 19 bp, Homo sapiens
tgaggggtgaagctgggtg

SEQ ID NO: 5038 - DNA, 20 bp, Homo sapiens
gatgatgggggtggtgggtg

SEQ ID NO: 5039 - DNA, 14 bp, Homo sapiens
tgagctccccagcc

SEQ ID NO: 5040 - DNA, 23 bp, Homo sapiens
agtgagctcctctcgatagcccc

SEQ ID NO: 5041 - DNA, 18 bp, Homo sapiens
agtgagttctgcctcagc

SEQ ID NO: 5042 - DNA, 18 bp, Homo sapiens
agtgaactccactcagcc

SEQ ID NO: 5043 - DNA, 22 bp, Homo sapiens
gcgcacccgcttacccagcccc

SEQ ID NO: 5044 - DNA, 19 bp, Homo sapiens
gtggcgccccacccagccc

SEQ ID NO: 5045 - DNA, 22 bp, Homo sapiens
agtggctcccaggaccagcccc

SEQ ID NO: 5046 - DNA, 19 bp, Homo sapiens
gctgggaccacccagctcc

SEQ ID NO: 5047 - DNA, 23 bp, Homo sapiens
agggagtcagcccgcccagcccc

SEQ ID NO: 5048 - DNA, 16 bp, Homo sapiens
tggccccgcccggccc

SEQ ID NO: 5049 - DNA, 18 bp, Homo sapiens
agcgggctggcccagccc

SEQ ID NO: 5050 - DNA, 21 bp, Homo sapiens
atgggctccgccttcagtccc

SEQ ID NO: 5051 - DNA, 23 bp, Homo sapiens
agtgagttcctaaccccggctcc

SEQ ID NO: 5052 - DNA, 21 bp, Homo sapiens
agtgagcttctgcctatgtcc

SEQ ID NO: 5053 - DNA, 22 bp, Homo sapiens
atgagtggcctcacccagcccc

SEQ ID NO: 5054 - DNA, 24 bp, Homo sapiens
agggagaagcccccacccagtccc

SEQ ID NO: 5055 - DNA, 24 bp, Homo sapiens
gtgggcagtcccccacccagcccc

SEQ ID NO: 5056 - DNA, 22 bp, Homo sapiens
gtgagccacggcacccagcccc

SEQ ID NO: 5057 - DNA, 19 bp, Homo sapiens
agtgagctttcccattgcc

SEQ ID NO: 5058 - DNA, 24 bp, Homo sapiens
agtgatgtggggatacccagcccc

SEQ ID NO: 5059 - DNA, 20 bp, Homo sapiens
gtgagctcccccatggctcc

SEQ ID NO: 5060 - DNA, 21 bp, Homo sapiens
gtgagctccgacaccggctcc

SEQ ID NO: 5061 - DNA, 22 bp, Homo sapiens
gagggtgcggccacccagttcc

SEQ ID NO: 5062 - DNA, 19 bp, Homo sapiens
tgggctccgcctgggctcc

SEQ ID NO: 5063 - DNA, 17 bp, Homo sapiens
aggagtcttacccagcc

SEQ ID NO: 5064 - DNA, 20 bp, Homo sapiens
gtgagtcctaccccagcccc

SEQ ID NO: 5065 - DNA, 21 bp, Homo sapiens
agcgagcttcacgtgctcagc

SEQ ID NO: 5066 - DNA, 15 bp, Homo sapiens
gctctgcccagcccc

SEQ ID NO: 5067 - DNA, 20 bp, Homo sapiens
agtgatctgcccattcggcc

SEQ ID NO: 5068 - DNA, 20 bp, Homo sapiens
gtgagccccagcctagcccc

SEQ ID NO: 5069 - DNA, 17 bp, Homo sapiens
tgggctccgccagctcc

SEQ ID NO: 5070 - DNA, 16 bp, Homo sapiens
aatgagcccacccagc

SEQ ID NO: 5071 - DNA, 18 bp, Homo sapiens
agtgagtttcacccaccc

SEQ ID NO: 5072 - DNA, 19 bp, Homo sapiens
gctgtgcccgcccagctcc

SEQ ID NO: 5073 - DNA, 17 bp, Homo sapiens
gcgacctcgcccagccc

SEQ ID NO: 5074 - DNA, 17 bp, Homo sapiens
tggctccgcccggctcc

SEQ ID NO: 5075 - DNA, 16 bp, Homo sapiens
agtgagcctcctagcc

SEQ ID NO: 5076 - DNA, 16 bp, Homo sapiens
gtggctctgccagccc

SEQ ID NO: 5077 - DNA, 15 bp, Homo sapiens
gtgcgctccgccgcc

SEQ ID NO: 5078 - DNA, 18 bp, Homo sapiens
gtgagctctccctgctcc

SEQ ID NO: 5079 - DNA, 20 bp, Homo sapiens
gtgactccgcctgcagcgcc

SEQ ID NO: 5080 - DNA, 20 bp, Homo sapiens
gtgagccacagcacccagcc

SEQ ID NO: 5081 - DNA, 23 bp, Homo sapiens
tgagctccgagcagcttagctcc

SEQ ID NO: 5082 - DNA, 21 bp, Homo sapiens
agtgcagcttcttcccagccc

SEQ ID NO: 5083 - DNA, 27 bp, Homo sapiens
agtgagctttgggtataacttagcccc

SEQ ID NO: 5084 - DNA, 77 bp, Vaccinia virus
gggggaaaggggaaggaggggaggctagaagcagcgggcgggcccgtcgtccgccgcccatccgcctagcggctgcc

SEQ ID NO: 5085 - DNA, 24 bp, Vaccinia virus
ccgccgcccatccgcctagcggct

SEQ ID NO: 5086 - DNA, 24 bp, Vaccinia virus
gggaaggaggggaggctagaagca

SEQ ID NO: 5087 - DNA, 18 bp, Homo sapiens
ccgtcgtccgtccgtcag

SEQ ID NO: 5088 - DNA, 27 bp, Homo sapiens
ccgccgcccgctcggttagccgctagg

SEQ ID NO: 5089 - DNA, 18 bp, Homo sapiens
ccgccgcccgctgcctgc

SEQ ID NO: 5090 - DNA, 24 bp, Homo sapiens
ccgccgccttttctagccccggct

SEQ ID NO: 5091 - DNA, 18 bp, Homo sapiens
gccgcctgcccgcccagc

SEQ ID NO: 5092 - DNA, 18 bp, Homo sapiens
ccgctgcctcttcgcggc

SEQ ID NO: 5093 - DNA, 26 bp, Homo sapiens
ccgccgcccgtcccccgggccgggct

SEQ ID NO: 5094 - DNA, 18 bp, Homo sapiens
ccctcccgcctagcggct

SEQ ID NO: 5095 - DNA, 18 bp, Homo sapiens
ccgccgccttccgcaggc

SEQ ID NO: 5096 - DNA, 23 bp, Homo sapiens
ccgccgcccgcttttgtccggct

SEQ ID NO: 5097 - DNA, 18 bp, Homo sapiens
ccgccgccctccgtctgc

SEQ ID NO: 5098 - DNA, 20 bp, Homo sapiens
cgccgcccaccaaaccggct

SEQ ID NO: 5099 - DNA, 14 bp, Homo sapiens
gccgcccgccccgg

SEQ ID NO: 5100 - DNA, 19 bp, Homo sapiens
ccgccgccagtccgcccgc

SEQ ID NO: 5101 - DNA, 23 bp, Homo sapiens
cgccgcccacttgcttccgcgct

SEQ ID NO: 5102 - DNA, 20 bp, Homo sapiens
ccttgcccattttagcggct

SEQ ID NO: 5103 - DNA, 19 bp, Homo sapiens
ccgccgcccggcccgcggc

SEQ ID NO: 5104 - DNA, 24 bp, Homo sapiens
ccgccgcctagtcctcggcagcgg

SEQ ID NO: 5105 - DNA, 20 bp, Homo sapiens
ccgctcgtcggccagcggct

SEQ ID NO: 5106 - DNA, 18 bp, Homo sapiens
ccgccgcccgctctcggc

SEQ ID NO: 5107 - DNA, 24 bp, Homo sapiens
cacccatccgggttagccgctagg

SEQ ID NO: 5108 - DNA, 21 bp, Homo sapiens
gccacccatttgccatatact

SEQ ID NO: 5109 - DNA, 20 bp, Homo sapiens
gctgcccgctctgcgccgct

SEQ ID NO: 5110 - DNA, 19 bp, Homo sapiens
ccgccgcctgcctgctgcc

SEQ ID NO: 5111 - DNA, 17 bp, Homo sapiens
gctcatccgccctggct

SEQ ID NO: 5112 - DNA, 18 bp, Homo sapiens
ggggcggaggggaggcca

SEQ ID NO: 5113 - DNA, 23 bp, Homo sapiens
gggaggcgaggggcgacgggggc

SEQ ID NO: 5114 - DNA, 19 bp, Homo sapiens
ggtgaggaggggatggggc

SEQ ID NO: 5115 - DNA, 18 bp, Homo sapiens
aggaggggggtcggaggc

SEQ ID NO: 5116 - DNA, 18 bp, Homo sapiens
aggagggagggagggagc

SEQ ID NO: 5117 - DNA, 18 bp, Homo sapiens
gggaggaggagggtgagc

SEQ ID NO: 5118 - DNA, 18 bp, Homo sapiens
gagagggagcttgggggc

SEQ ID NO: 5119 - DNA, 19 bp, Homo sapiens
gggaggcgggcgcggaggc

SEQ ID NO: 5120 - DNA, 21 bp, Homo sapiens
gggaagggggaggaggggaag

SEQ ID NO: 5121 - DNA, 18 bp, Homo sapiens
gggaggcagggaaggggc

SEQ ID NO: 5122 - DNA, 19 bp, Homo sapiens
gggaggaggggaagggaga

SEQ ID NO: 5123 - DNA, 22 bp, Homo sapiens
gggaggaggtggcggcgggagc

SEQ ID NO: 5124 - DNA, 24 bp, Homo sapiens
ggaagggaggggacacgcggagca

SEQ ID NO: 5125 - DNA, 23 bp, Homo sapiens
gggagtggggtgagctgggggca

SEQ ID NO: 5126 - DNA, 18 bp, Homo sapiens
gggaggcagggaaggaag

SEQ ID NO: 5127 - DNA, 23 bp, Homo sapiens
gggacggagggggcagtgaagca

SEQ ID NO: 5128 - DNA, 18 bp, Homo sapiens
ggaacggaggctagaggc

SEQ ID NO: 5129 - DNA, 21 bp, Homo sapiens
gggaaggaggtctagggaggc

SEQ ID NO: 5130 - DNA, 21 bp, Homo sapiens
gggaggagggaccgccaggca

SEQ ID NO: 5131 - DNA, 23 bp, Homo sapiens
gggaaggaggggtggaatttgca

SEQ ID NO: 5132 - DNA, 22 bp, Homo sapiens
gggaggcggggatcttgggagc

SEQ ID NO: 5133 - DNA, 19 bp, Homo sapiens
gggaggaggggatgtacca

SEQ ID NO: 5134 - DNA, 20 bp, Homo sapiens
gggagggaggcggcgaaggc

SEQ ID NO: 5135 - DNA, 18 bp, Homo sapiens
gggagcaggggacagggc

SEQ ID NO: 5136 - DNA, 18 bp, Homo sapiens
gggaaggagtgggagggc

SEQ ID NO: 5137 - DNA, 19 bp, Homo sapiens
gggagggagagggagaggc

SEQ ID NO: 5138 - DNA, 19 bp, Homo sapiens
gggaggaggcggagggagc

SEQ ID NO: 5139 - DNA, 20 bp, Homo sapiens
ggaggcggggctggaggagc

SEQ ID NO: 5140 - DNA, 25 bp, Homo sapiens
gggaaggcaggggccatagaggagc

SEQ ID NO: 5141 - DNA, 17 bp, Homo sapiens
ggaaagaggctggaagc

SEQ ID NO: 5142 - DNA, 26 bp, Homo sapiens
gggaagaaggggaggcgccagaggca

SEQ ID NO: 5143 - DNA, 18 bp, Homo sapiens
gggaaggaggggcggagc

SEQ ID NO: 5144 - DNA, 16 bp, Homo sapiens
gggcagggggaataga

SEQ ID NO: 5145 - DNA, 18 bp, Homo sapiens
gggatgaggggggaaaga

SEQ ID NO: 5146 - DNA, 19 bp, Homo sapiens
aggagggaggggagcagct

SEQ ID NO: 5147 - DNA, 20 bp, Homo sapiens
gggaggcggggaacaggggc

SEQ ID NO: 5148 - DNA, 17 bp, Homo sapiens
ggggcggaggggaccaa

SEQ ID NO: 5149 - DNA, 15 bp, Homo sapiens
gggagaggggaggag

SEQ ID NO: 5150 - DNA, 21 bp, Homo sapiens
gggaaggagtgaccggagaag

SEQ ID NO: 5151 - DNA, 20 bp, Homo sapiens
gggaggagggggcgcgagca

SEQ ID NO: 5152 - DNA, 23 bp, Homo sapiens
gggaaggagaggcagagggaggc

SEQ ID NO: 5153 - DNA, 20 bp, Homo sapiens
ggaagggaggggacgggggc

SEQ ID NO: 5154 - DNA, 27 bp, Homo sapiens
gggaggaggaggaggagaggaggaggc

SEQ ID NO: 5155 - DNA, 21 bp, Homo sapiens
ggtaaggagggggaaaaagca

SEQ ID NO: 5156 - DNA, 22 bp, Homo sapiens
gggacaggaaccggctaggggc

SEQ ID NO: 5157 - DNA, 24 bp, Homo sapiens
gggaaggagtggggaaggggaggc

SEQ ID NO: 5158 - DNA, 19 bp, Homo sapiens
gggaaggcggggctggggc

SEQ ID NO: 5159 - DNA, 21 bp, Homo sapiens
gggaaggaggaggctggggca

SEQ ID NO: 5160 - DNA, 18 bp, Homo sapiens
gggaggaggggaggaggc

SEQ ID NO: 5161 - DNA, 24 bp, Homo sapiens
gggaggaggggaggggacaagggc

SEQ ID NO: 5162 - DNA, 18 bp, Homo sapiens
gggaaggatgggaggcag

SEQ ID NO: 5163 - DNA, 21 bp, Homo sapiens
gggggcaggggaggccaggca

SEQ ID NO: 5164 - DNA, 19 bp, Homo sapiens
gggagcgagggcgagaggc

SEQ ID NO: 5165 - DNA, 20 bp, Homo sapiens
ggggaggagggacggggagc

SEQ ID NO: 5166 - DNA, 21 bp, Homo sapiens
gggaagggggagaagaaggca

SEQ ID NO: 5167 - DNA, 23 bp, Homo sapiens
gggaatgggcatggctagaagca

SEQ ID NO: 5168 - DNA, 24 bp, Homo sapiens
gggaagggaggggagaaccaagca

SEQ ID NO: 5169 - DNA, 20 bp, Homo sapiens
gggaggcgggggcggagggc

SEQ ID NO: 5170 - DNA, 18 bp, Homo sapiens
gggggggaggtggcacag

SEQ ID NO: 5171 - DNA, 17 bp, Homo sapiens
ggagggggggaggtggc

SEQ ID NO: 5172 - DNA, 19 bp, Homo sapiens
gggaggcggggtgccgggc

SEQ ID NO: 5173 - DNA, 21 bp, Homo sapiens
ggagaggagggggctaagggc

SEQ ID NO: 5174 - DNA, 22 bp, Homo sapiens
gggcaggaggctttctgggggc

SEQ ID NO: 5175 - DNA, 18 bp, Homo sapiens
ggaggggagggaaggagc

SEQ ID NO: 5176 - DNA, 18 bp, Homo sapiens
gggagaagagctgggggc

SEQ ID NO: 5177 - DNA, 18 bp, Homo sapiens
gggaaggcgggggcgggc

SEQ ID NO: 5178 - DNA, 18 bp, Homo sapiens
gggaagaggggaatgggc

SEQ ID NO: 5179 - DNA, 29 bp, Homo sapiens
ggcaaggagggaagaggtatgcttctagc

SEQ ID NO: 5180 - DNA, 19 bp, Homo sapiens
gggcaggagggagggaggc

SEQ ID NO: 5181 - DNA, 18 bp, Homo sapiens
gggagggaggcggtcagg

SEQ ID NO: 5182 - DNA, 22 bp, Homo sapiens
ggtagggaggggaagcaggagc

SEQ ID NO: 5183 - DNA, 20 bp, Homo sapiens
agagggaaccgttagaagca

SEQ ID NO: 5184 - DNA, 19 bp, Homo sapiens
ggggggaaggggagaaagc

SEQ ID NO: 5185 - DNA, 24 bp, Homo sapiens
gggaaggggaggaggagaaaagca

SEQ ID NO: 5186 - DNA, 21 bp, Homo sapiens
gggagggagggaggacacagc

SEQ ID NO: 5187 - DNA, 20 bp, Homo sapiens
ggggagggggggagggggca

SEQ ID NO: 5188 - DNA, 18 bp, Homo sapiens
gggagagggaaagggggc

SEQ ID NO: 5189 - DNA, 23 bp, Homo sapiens
gggaaggggaggatgggggagca

SEQ ID NO: 5190 - DNA, 20 bp, Homo sapiens
gggaaggaggcggtgcgggc

SEQ ID NO: 5191 - DNA, 20 bp, Homo sapiens
gggaaggagggtggggacag

SEQ ID NO: 5192 - DNA, 22 bp, Homo sapiens
ggaaaggaggaagtctgggggc

SEQ ID NO: 5193 - DNA, 19 bp, Homo sapiens
gggaaggaggggcgtgggc

SEQ ID NO: 5194 - DNA, 22 bp, Homo sapiens
ggggggaggggagcggggagca

SEQ ID NO: 5195 - DNA, 22 bp, Homo sapiens
gggaaggaggggggaggatggc

SEQ ID NO: 5196 - DNA, 18 bp, Homo sapiens
gggggaggggaggggagc

SEQ ID NO: 5197 - DNA, 26 bp, Homo sapiens
ggggcgggagggagcgtgcttctagc

SEQ ID NO: 5198 - DNA, 24 bp, Homo sapiens
gagagggaggggagggagggggca

SEQ ID NO: 5199 - DNA, 20 bp, Homo sapiens
gggagggagggggcaaaagc

SEQ ID NO: 5200 - DNA, 18 bp, Homo sapiens
gggagggagtggaggaag

SEQ ID NO: 5201 - DNA, 22 bp, Homo sapiens
gggggcaggggaggacctgggc

SEQ ID NO: 5202 - DNA, 24 bp, Homo sapiens
gggaggaaggggtggcaggaggca

SEQ ID NO: 5203 - DNA, 20 bp, Homo sapiens
gggagaagggggtgctgagc

SEQ ID NO: 5204 - DNA, 25 bp, Homo sapiens
gggaaggatgggacagaaaggggca

SEQ ID NO: 5205 - DNA, 17 bp, Homo sapiens
gggggagagggaggaag

SEQ ID NO: 5206 - DNA, 22 bp, Homo sapiens
gggaaggagggggctggagaag

SEQ ID NO: 5207 - DNA, 17 bp, Homo sapiens
gggggcaggggagccag

SEQ ID NO: 5208 - DNA, 19 bp, Homo sapiens
aggaaggagggagggaggc

SEQ ID NO: 5209 - DNA, 20 bp, Homo sapiens
gggcggggggtgagggagca

SEQ ID NO: 5210 - DNA, 19 bp, Homo sapiens
gggaggggaggggggcagc

SEQ ID NO: 5211 - DNA, 21 bp, Homo sapiens
gggaaggggaggggagaggca

SEQ ID NO: 5212 - DNA, 19 bp, Homo sapiens
gggaagaggggaaagggag

SEQ ID NO: 5213 - DNA, 22 bp, Homo sapiens
gggaaggagggcggtgtcggca

SEQ ID NO: 5214 - DNA, 24 bp, Homo sapiens
gggagggtggggaggcagggggca

SEQ ID NO: 5215 - DNA, 17 bp, Homo sapiens
ggggggaggggagaagc

SEQ ID NO: 5216 - DNA, 16 bp, Homo sapiens
gggagggagaggaggg

SEQ ID NO: 5217 - DNA, 25 bp, Homo sapiens
gggaggagaggggagtgtgcttctg

SEQ ID NO: 5218 - DNA, 28 bp, Homo sapiens
gggaaggcagggggtgtggctggaggca

SEQ ID NO: 5219 - DNA, 16 bp, Homo sapiens
ggaaaggaggggggag

SEQ ID NO: 5220 - DNA, 19 bp, Homo sapiens
aggaggagggctaggaggc

SEQ ID NO: 5221 - DNA, 21 bp, Homo sapiens
gggaaggagagggaggagggc

SEQ ID NO: 5222 - DNA, 24 bp, Homo sapiens
gggagggaagggagaacaggggca

SEQ ID NO: 5223 - DNA, 18 bp, Homo sapiens
ggagggggagggggaagc

SEQ ID NO: 5224 - DNA, 21 bp, Homo sapiens
ggaagggagactttgggggca

SEQ ID NO: 5225 - DNA, 18 bp, Homo sapiens
gggaggcgggaagggggc

SEQ ID NO: 5226 - DNA, 20 bp, Homo sapiens
ggggaggggaaaggctgaag

SEQ ID NO: 5227 - DNA, 23 bp, Homo sapiens
gggaagggaggggcgcaggaggc

SEQ ID NO: 5228 - DNA, 24 bp, Homo sapiens
aggaggaggggaggaaaaagagca

SEQ ID NO: 5229 - DNA, 17 bp, Homo sapiens
gggaggaggggcggcta

SEQ ID NO: 5230 - DNA, 19 bp, Homo sapiens
gggaggggcgggggcaggc

SEQ ID NO: 5231 - DNA, 24 bp, Homo sapiens
gggaagggaggggaggggagggca

SEQ ID NO: 5232 - DNA, 20 bp, Homo sapiens
ggaggggagggcagggggca

SEQ ID NO: 5233 - DNA, 20 bp, Homo sapiens
gagaaggctagggttggagg

SEQ ID NO: 5234 - DNA, 20 bp, Homo sapiens
gggaggagggaggcagggca

SEQ ID NO: 5235 - DNA, 19 bp, Homo sapiens
gggaagggagggaagtgag

SEQ ID NO: 5236 - DNA, 18 bp, Homo sapiens
gggaagggagggggtagc

SEQ ID NO: 5237 - DNA, 20 bp, Homo sapiens
gggggaggggagcggagagc

SEQ ID NO: 5238 - DNA, 21 bp, Homo sapiens
gggagaaggggattagggggc

SEQ ID NO: 5239 - DNA, 19 bp, Homo sapiens
gggaggaggggggcacagc

SEQ ID NO: 5240 - DNA, 20 bp, Homo sapiens
gggaggagggggcgggacgc

SEQ ID NO: 5241 - DNA, 18 bp, Homo sapiens
gggagggagggaggaaag

SEQ ID NO: 5242 - DNA, 17 bp, Homo sapiens
aggagggagggaggagc

SEQ ID NO: 5243 - DNA, 18 bp, Homo sapiens
gggaagcgagggggggcc

SEQ ID NO: 5244 - DNA, 84 bp, Vaccinia virus
ggacaggcccccccgctggcgcaaaaatacaatagctctcgattatccgccattggattttttgcccgcgcgggggcgatgtcc

SEQ ID NO: 5245 - DNA, 24 bp, Vaccinia virus
cattggattttttgcccgcgcggg

SEQ ID NO: 5246 - DNA, 24 bp, Vaccinia virus
gcgcaaaaatacaatagctctcga

SEQ ID NO: 5247 - DNA, 22 bp, Homo sapiens
gcaaaaatacaatcttcatcga

SEQ ID NO: 5248 - DNA, 16 bp, Homo sapiens
gcgcaaaaaacgccct

SEQ ID NO: 5249 - DNA, 20 bp, Homo sapiens
gccagagagccaagctctcg

SEQ ID NO: 5250 - DNA, 71 bp, Vaccinia virus
gccgcagccccagctgcccccccggcgcgcgcgatagcgaggttgctcgggggggcgctgttgccgccggc

SEQ ID NO: 5251 - DNA, 24 bp, Vaccinia virus
cagctgcccccccggcgcgcgcga

SEQ ID NO: 5252 - DNA, 24 bp, Vaccinia virus
ctcgggggggcgctgttgccgccg

SEQ ID NO: 5253 - DNA, 18 bp, Homo sapiens
cagctgtcctccaggtgc

SEQ ID NO: 5254 - DNA, 21 bp, Homo sapiens
gcttcctccctgggcgcacga

SEQ ID NO: 5255 - DNA, 18 bp, Homo sapiens
cagctgccttccggcccg

SEQ ID NO: 5256 - DNA, 21 bp, Homo sapiens
cagctgctcaccacgcgcgcg

SEQ ID NO: 5257 - DNA, 20 bp, Homo sapiens
cagcgtctcccaggcgcgcg

SEQ ID NO: 5258 - DNA, 24 bp, Homo sapiens
cagccgcctctcgaccgccgcgcg

SEQ ID NO: 5259 - DNA, 21 bp, Homo sapiens
cagctgcgctcagggcgcgcg

SEQ ID NO: 5260 - DNA, 15 bp, Homo sapiens
gccgcccctcgcgcg

SEQ ID NO: 5261 - DNA, 20 bp, Homo sapiens
gctgcccctgcgcgcccgcg

SEQ ID NO: 5262 - DNA, 19 bp, Homo sapiens
cagctgcctcctgggttca

SEQ ID NO: 5263 - DNA, 19 bp, Homo sapiens
agctgccctccctgtggcg

SEQ ID NO: 5264 - DNA, 22 bp, Homo sapiens
agccaaggtcccggcgcgcgcg

SEQ ID NO: 5265 - DNA, 22 bp, Homo sapiens
gctgccccttcgccccggcgcg

SEQ ID NO: 5266 - DNA, 18 bp, Homo sapiens
cagtcgctccccagcgcg

SEQ ID NO: 5267 - DNA, 18 bp, Homo sapiens
gctgccccaccccgcgcg

SEQ ID NO: 5268 - DNA, 20 bp, Homo sapiens
tgactgcgagggcgcgcgcg

SEQ ID NO: 5269 - DNA, 20 bp, Homo sapiens
cagtgtctcctccacgcgcg

SEQ ID NO: 5270 - DNA, 21 bp, Homo sapiens
cagctgccgcctccggccacg

SEQ ID NO: 5271 - DNA, 26 bp, Homo sapiens
actgccttccccgtggtcgcgcgcgc

SEQ ID NO: 5272 - DNA, 17 bp, Homo sapiens
gctgctccgcgcgcgcg

SEQ ID NO: 5273 - DNA, 18 bp, Homo sapiens
gctgccccccatggtgcg

SEQ ID NO: 5274 - DNA, 18 bp, Homo sapiens
cagctgccccccggcccg

SEQ ID NO: 5275 - DNA, 18 bp, Homo sapiens
cagctgccccccgaaacg

SEQ ID NO: 5276 - DNA, 21 bp, Homo sapiens
cagctgccttccctgtgcccg

SEQ ID NO: 5277 - DNA, 17 bp, Homo sapiens
gctctccacggcgcgcg

SEQ ID NO: 5278 - DNA, 25 bp, Homo sapiens
cagccgccctcccggcaccgcagcg

SEQ ID NO: 5279 - DNA, 17 bp, Homo sapiens
tgtccccccagcagcca

SEQ ID NO: 5280 - DNA, 22 bp, Homo sapiens
ctcgggggggcgctgccctccg

SEQ ID NO: 5281 - DNA, 19 bp, Homo sapiens
ctcgggagggcgctgccgc

SEQ ID NO: 5282 - DNA, 21 bp, Homo sapiens
ctcggggggcgcgctcagccg

SEQ ID NO: 5283 - DNA, 21 bp, Homo sapiens
ctcgcgggggcgctccggccg

SEQ ID NO: 5284 - DNA, 63 bp, Yaba-like disease virus
ccataaagaccattacctcggggctccagtttggtgtggatgccttagagagggggttagtgg

SEQ ID NO: 5285 - DNA, 23 bp, Yaba-like disease virus
tgccttagagagggggttagtgg

SEQ ID NO: 5286 - DNA, 24 bp, Yaba-like disease virus
taaagaccattacctcggggctcc

SEQ ID NO: 5287 - DNA, 14 bp, Homo sapiens
ccttagagagaagt

SEQ ID NO: 5288 - DNA, 18 bp, Homo sapiens
cttggaggggctatgtgg

SEQ ID NO: 5289 - DNA, 18 bp, Homo sapiens
tgcctggaggggggccag

SEQ ID NO: 5290 - DNA, 19 bp, Homo sapiens
tgctttgaagagggggtag

SEQ ID NO: 5291 - DNA, 19 bp, Homo sapiens
tgccattaggggccagtgg

SEQ ID NO: 5292 - DNA, 18 bp, Homo sapiens
ccttggagagaagagtgg

SEQ ID NO: 5293 - DNA, 20 bp, Homo sapiens
tgctgtagagaggccagtgg

SEQ ID NO: 5294 - DNA, 20 bp, Homo sapiens
tgccttagggggaggggctt

SEQ ID NO: 5295 - DNA, 20 bp, Homo sapiens
tgccttgagagggagaatgg

SEQ ID NO: 5296 - DNA, 18 bp, Homo sapiens
aagaggccaccggggctc

SEQ ID NO: 5297 - DNA, 19 bp, Homo sapiens
tgaggccagcctggggctc

SEQ ID NO: 5298 - DNA, 19 bp, Homo sapiens
tgaggccagcttggggctc

SEQ ID NO: 5299 - DNA, 19 bp, Homo sapiens
aagaccattacacacagct

SEQ ID NO: 5300 - DNA, 20 bp, Homo sapiens
gacggaggcctcggggctcc

SEQ ID NO: 5301 - DNA, 24 bp, Homo sapiens
tgagaccattgtggaagggggttc

SEQ ID NO: 5302 - DNA, 17 bp, Homo sapiens
agaccattacaagtttc

SEQ ID NO: 5303 - DNA, 19 bp, Homo sapiens
aagaccactgcccgtgctc

SEQ ID NO: 5304 - DNA, 20 bp, Homo sapiens
agagaaggcctcggggctcc

SEQ ID NO: 5305 - DNA, 22 bp, Homo sapiens
aaagacttgggcttggggctcc

SEQ ID NO: 5306 - DNA, 19 bp, Homo sapiens
gaccattgtctctcagctc

SEQ ID NO: 5307 - DNA, 20 bp, Homo sapiens
gagccgttgtcctcgaggct

SEQ ID NO: 5308 - DNA, 64 bp, Yaba-like disease virus
tggattatttctcccaacaccccagtattcaacaacatcagtgataaggggtgtggagtctcca

SEQ ID NO: 5309 - DNA, 24 bp, Yaba-like disease virus
tatttctcccaacaccccagtatt

SEQ ID NO: 5310 - DNA, 18 bp, Yaba-like disease virus
aggggtgtggagtctcca

SEQ ID NO: 5311 - DNA, 22 bp, Homo sapiens
tatttcttttggtgccagtatt

SEQ ID NO: 5312 - DNA, 17 bp, Homo sapiens
tatttctccccagtact

SEQ ID NO: 5313 - DNA, 19 bp, Homo sapiens
tttctcttggcaccccaat

SEQ ID NO: 5314 - DNA, 19 bp, Homo sapiens
atttctcctaacactaagt

SEQ ID NO: 5315 - DNA, 18 bp, Homo sapiens
aggggtctggcttctcca

SEQ ID NO: 5316 - DNA, 18 bp, Homo sapiens
agggagagggagtctcca

SEQ ID NO: 5317 - DNA, 17 bp, Homo sapiens
aggagtgcctatctcca

SEQ ID NO: 5318 - DNA, 15 bp, Homo sapiens
agagggtgaattcca

SEQ ID NO: 5319 - DNA, 16 bp, Homo sapiens
aggggtgggagcccca

SEQ ID NO: 5320 - DNA, 15 bp, Homo sapiens
aggggcgtggatcca

SEQ ID NO: 5321 - DNA, 20 bp, Homo sapiens
agggtgtgcaaatctttcca

SEQ ID NO: 5322 - DNA, 17 bp, Homo sapiens
aggggcgccttcctcca

SEQ ID NO: 5323 - DNA, 17 bp, Homo sapiens
aggggttggatattcca

SEQ ID NO: 5324 - DNA, 17 bp, Homo sapiens
aggagtatctgtcttca

SEQ ID NO: 5325 - DNA, 19 bp, Homo sapiens
agaggtgtggacatttcca

SEQ ID NO: 5326 - DNA, 15 bp, Homo sapiens
aggagaaagtctcca

SEQ ID NO: 5327 - DNA, 15 bp, Homo sapiens
aagggtgtccctcca

SEQ ID NO: 5328 - DNA, 15 bp, Homo sapiens
aggggctgtgcccca

SEQ ID NO: 5329 - DNA, 15 bp, Homo sapiens
agggatgtggcccca

SEQ ID NO: 5330 - DNA, 18 bp, Homo sapiens
aggagtgtcccccctcca

SEQ ID NO: 5331 - DNA, 18 bp, Homo sapiens
agaggtgtggaatcccca

SEQ ID NO: 5332 - DNA, 17 bp, Homo sapiens
agaggtgtctccctcca

SEQ ID NO: 5333 - DNA, 18 bp, Homo sapiens
ggtggtgtggcagagcca

SEQ ID NO: 5334 - DNA, 15 bp, Homo sapiens
aggggtgttggtcca

SEQ ID NO: 5335 - DNA, 19 bp, Homo sapiens
ggagcctgctgagtctcca

SEQ ID NO: 5336 - DNA, 19 bp, Homo sapiens
aggcgtgattctgtttcca

SEQ ID NO: 5337 - DNA, 18 bp, Homo sapiens
agggctgcagagtcttca

SEQ ID NO: 5338 - DNA, 19 bp, Homo sapiens
ggggtgggctgtctctcca

SEQ ID NO: 5339 - DNA, 17 bp, Homo sapiens
agggaggccagtctcca

SEQ ID NO: 5340 - DNA, 17 bp, Homo sapiens
aggggaggtaaattcca

SEQ ID NO: 5341 - DNA, 18 bp, Homo sapiens
agaggtagaacatttcca

SEQ ID NO: 5342 - DNA, 19 bp, Homo sapiens
gggtgtggactcctctcca

SEQ ID NO: 5343 - DNA, 15 bp, Homo sapiens
agggggcacgttcca

SEQ ID NO: 5344 - DNA, 17 bp, Homo sapiens
agcggtgtggactccca

SEQ ID NO: 5345 - DNA, 20 bp, Homo sapiens
aggagtgtgttttttctcca

SEQ ID NO: 5346 - DNA, 20 bp, Homo sapiens
aggagtgtgttttctctcca

SEQ ID NO: 5347 - DNA, 20 bp, Homo sapiens
aggagtgtgtcttctctcca

SEQ ID NO: 5348 - DNA, 17 bp, Homo sapiens
agaagcatgggtttcca

SEQ ID NO: 5349 - DNA, 18 bp, Homo sapiens
aggagaactgagtctcca

SEQ ID NO: 5350 - DNA, 17 bp, Homo sapiens
aggggtttgttccccca

SEQ ID NO: 5351 - DNA, 17 bp, Homo sapiens
aggggtatgcggctcca

SEQ ID NO: 5352 - DNA, 18 bp, Homo sapiens
aggggtgttgcttctcca

SEQ ID NO: 5353 - DNA, 18 bp, Homo sapiens
ggggccagacagtctcca

SEQ ID NO: 5354 - DNA, 18 bp, Homo sapiens
aagggttccgggagtctc

SEQ ID NO: 5355 - DNA, 17 bp, Homo sapiens
aggagtgagggtttcca

SEQ ID NO: 5356 - DNA, 16 bp, Homo sapiens
agggatgtctcttcca

SEQ ID NO: 5357 - DNA, 21 bp, Homo sapiens
agaggtacaccagggtttcca

SEQ ID NO: 5358 - DNA, 19 bp, Homo sapiens
ggggtgtatgctttttcca

SEQ ID NO: 5359 - DNA, 17 bp, Homo sapiens
agggctgtggaagacca

SEQ ID NO: 5360 - DNA, 18 bp, Homo sapiens
agggatgtgaaaattcca

SEQ ID NO: 5361 - DNA, 17 bp, Homo sapiens
aggggtgttctcatcca

SEQ ID NO: 5362 - DNA, 19 bp, Homo sapiens
aggggcatcatggagtttc

SEQ ID NO: 5363 - DNA, 16 bp, Homo sapiens
aggggcgtggccccca

SEQ ID NO: 5364 - DNA, 20 bp, Homo sapiens
aggggtgtggcatccctcca

SEQ ID NO: 5365 - DNA, 18 bp, Homo sapiens
ggggtgtgttttcctcca

SEQ ID NO: 5366 - DNA, 18 bp, Homo sapiens
ggtgctcatgagtctcca

SEQ ID NO: 5367 - DNA, 19 bp, Homo sapiens
gaggtgtggatgccctcca

SEQ ID NO: 5368 - DNA, 20 bp, Homo sapiens
ggagtgtgtagtattttcca

SEQ ID NO: 5369 - DNA, 21 bp, Homo sapiens
ggggtgggaggtgggtctcca

SEQ ID NO: 5370 - DNA, 18 bp, Homo sapiens
gaggtgtgggcaagtcca

SEQ ID NO: 5371 - DNA, 18 bp, Homo sapiens
aggggtgatggaggccca

SEQ ID NO: 5372 - DNA, 18 bp, Homo sapiens
aggagaagcgtggtctcc

SEQ ID NO: 5373 - DNA, 18 bp, Homo sapiens
agggctgtggagcttcca

SEQ ID NO: 5374 - DNA, 15 bp, Homo sapiens
aggaagcagtctcca

SEQ ID NO: 5375 - DNA, 18 bp, Homo sapiens
agaggtgtgaaaggttcc

SEQ ID NO: 5376 - DNA, 20 bp, Homo sapiens
agggtgtgtgtatgtgttcc

SEQ ID NO: 5377 - DNA, 15 bp, Homo sapiens
agggggtgggcccca

SEQ ID NO: 5378 - DNA, 16 bp, Homo sapiens
aggggtgttggtccca

SEQ ID NO: 5379 - DNA, 16 bp, Homo sapiens
agcggtccagtctcca

SEQ ID NO: 5380 - DNA, 15 bp, Homo sapiens
agaggtgtccctcca

SEQ ID NO: 5381 - DNA, 19 bp, Homo sapiens
gggcacaagggagtctcca

SEQ ID NO: 5382 - DNA, 61 bp, Yaba-like disease virus
ccacccagagccacatgaggatcccgtcgcgggaacggacccacatggcggcggagggtgg

SEQ ID NO: 5383 - DNA, 24 bp, Yaba-like disease virus
acggacccacatggcggcggaggg

SEQ ID NO: 5384 - DNA, 24 bp, Yaba-like disease virus
acccagagccacatgaggatcccg

SEQ ID NO: 5385 - DNA, 21 bp, Homo sapiens
cgggccgggggtggcggaggg

SEQ ID NO: 5386 - DNA, 24 bp, Homo sapiens
acggggctgcatggcggctccaag

SEQ ID NO: 5387 - DNA, 18 bp, Homo sapiens
cggcccgtgtccgggggg

SEQ ID NO: 5388 - DNA, 19 bp, Homo sapiens
acggagccggaggcggagg

SEQ ID NO: 5389 - DNA, 16 bp, Homo sapiens
gggcccgccgcggagg

SEQ ID NO: 5390 - DNA, 19 bp, Homo sapiens
acgtgcccgttagcggagg

SEQ ID NO: 5391 - DNA, 25 bp, Homo sapiens
acggcgtccacatgggccatgaggg

SEQ ID NO: 5392 - DNA, 19 bp, Homo sapiens
cgggctggcgtgcagagag

SEQ ID NO: 5393 - DNA, 23 bp, Homo sapiens
cggcctcgcgcgctcgcggaggg

SEQ ID NO: 5394 - DNA, 16 bp, Homo sapiens
cgggcccaggcggagg

SEQ ID NO: 5395 - DNA, 18 bp, Homo sapiens
cgcccggctggcggaggg

SEQ ID NO: 5396 - DNA, 18 bp, Homo sapiens
ggacccacaggtccaggg

SEQ ID NO: 5397 - DNA, 17 bp, Homo sapiens
cgggcgagcggcggagg

SEQ ID NO: 5398 - DNA, 23 bp, Homo sapiens
cgggccggcgggcgggcggaggg

SEQ ID NO: 5399 - DNA, 17 bp, Homo sapiens
cggctccggggcggagg

SEQ ID NO: 5400 - DNA, 14 bp, Homo sapiens
ggacccatggcgag

SEQ ID NO: 5401 - DNA, 21 bp, Homo sapiens
cggccggggggcggcggaggg

SEQ ID NO: 5402 - DNA, 18 bp, Homo sapiens
cggcggcggtggcggagg

SEQ ID NO: 5403 - DNA, 20 bp, Homo sapiens
cggacttggctggcggaggg

SEQ ID NO: 5404 - DNA, 19 bp, Homo sapiens
cggcccgcaggtcgggggg

SEQ ID NO: 5405 - DNA, 19 bp, Homo sapiens
gggtctggtggacagaagg

SEQ ID NO: 5406 - DNA, 21 bp, Homo sapiens
actgacccacatgggcgaggg

SEQ ID NO: 5407 - DNA, 22 bp, Homo sapiens
cgggcccaacggacggcggggg

SEQ ID NO: 5408 - DNA, 17 bp, Homo sapiens
cgggctcgggacggagg

SEQ ID NO: 5409 - DNA, 22 bp, Homo sapiens
ggacatgcgtactagcggaggg

SEQ ID NO: 5410 - DNA, 21 bp, Homo sapiens
ggcccacgggtgggcggaggg

SEQ ID NO: 5411 - DNA, 16 bp, Homo sapiens
ggctacgcggcggagg

SEQ ID NO: 5412 - DNA, 20 bp, Homo sapiens
cgagcctggggcggcggggg

SEQ ID NO: 5413 - DNA, 16 bp, Homo sapiens
gaccccatggcggagg

SEQ ID NO: 5414 - DNA, 20 bp, Homo sapiens
ggatccggcggcggcggggg

SEQ ID NO: 5415 - DNA, 23 bp, Homo sapiens
cggctcacgtcccgggcggaggg

SEQ ID NO: 5416 - DNA, 18 bp, Homo sapiens
aaagccacccccaggtcc

SEQ ID NO: 5417 - DNA, 17 bp, Homo sapiens
acccagagccactgagg

SEQ ID NO: 5418 - DNA, 16 bp, Homo sapiens
cagagccacggcctcc

SEQ ID NO: 5419 - DNA, 20 bp, Homo sapiens
cctagggccacggaggatcc

SEQ ID NO: 5420 - DNA, 21 bp, Homo sapiens
acctgcgtcctgaggatcccg

SEQ ID NO: 5421 - DNA, 19 bp, Homo sapiens
ccagagccaactgcagtcc

SEQ ID NO: 5422 - DNA, 19 bp, Homo sapiens
acccagagacacagaatcc

SEQ ID NO: 5423 - DNA, 17 bp, Homo sapiens
aggcccaggggatcccg

SEQ ID NO: 5424 - DNA, 19 bp, Homo sapiens
ccagggtccttcaaggatc

SEQ ID NO: 5425 - DNA, 15 bp, Homo sapiens
cccagagcgtgcccc

SEQ ID NO: 5426 - DNA, 20 bp, Homo sapiens
acccagagttccatgaggtc

SEQ ID NO: 5427 - DNA, 21 bp, Homo sapiens
cagggccacataccactcccg

SEQ ID NO: 5428 - DNA, 15 bp, Homo sapiens
cagagcaaaggatcc

SEQ ID NO: 5429 - DNA, 22 bp, Homo sapiens
cctggagccacagagaaacccg

SEQ ID NO: 5430 - DNA, 25 bp, Homo sapiens
cccagagcgcgcagggacggtcccg

SEQ ID NO: 5431 - DNA, 19 bp, Homo sapiens
acccagagccgggttttcc

SEQ ID NO: 5432 - DNA, 17 bp, Homo sapiens
cccagagcccatttccc

SEQ ID NO: 5433 - DNA, 17 bp, Homo sapiens
cccggggccgagatccc

SEQ ID NO: 5434 - DNA, 18 bp, Homo sapiens
cagggccccatgaagacc

SEQ ID NO: 5435 - DNA, 17 bp, Homo sapiens
cctggagccacaagacc

SEQ ID NO: 5436 - DNA, 17 bp, Homo sapiens
cctaggctcaggatccc

SEQ ID NO: 5437 - DNA, 17 bp, Homo sapiens
ccaggcctggggatccc

SEQ ID NO: 5438 - DNA, 20 bp, Homo sapiens
ccatggcaatgaggatcccg

SEQ ID NO: 5439 - DNA, 18 bp, Homo sapiens
acccagaaccataagtcc

SEQ ID NO: 5440 - DNA, 18 bp, Homo sapiens
cccggagccacagccccc

SEQ ID NO: 5441 - DNA, 20 bp, Homo sapiens
cagagccacgggaacaagcc

SEQ ID NO: 5442 - DNA, 19 bp, Homo sapiens
cccagggcccgggatcccg

SEQ ID NO: 5443 - DNA, 16 bp, Homo sapiens
acccagagctacaagg

SEQ ID NO: 5444 - DNA, 18 bp, Homo sapiens
acccagagcttgaaattc

SEQ ID NO: 5445 - DNA, 18 bp, Homo sapiens
acccatggccacatgaaa

SEQ ID NO: 5446 - DNA, 19 bp, Homo sapiens
cccagagcaaacggggttc

SEQ ID NO: 5447 - DNA, 18 bp, Homo sapiens
cagagccatctgtggttc

SEQ ID NO: 5448 - DNA, 20 bp, Homo sapiens
ccggggccgccgaaatcccg

SEQ ID NO: 5449 - DNA, 19 bp, Homo sapiens
acccagagccacagccccc

SEQ ID NO: 5450 - DNA, 16 bp, Homo sapiens
cccagggcggggatcc

SEQ ID NO: 5451 - DNA, 85 bp, Yaba-like disease virus
ccatgtcagaggtccagtacccatgatactggcatcactgttaaacagacagttcttgtcaatgggtttgtggcctttgccatgg

SEQ ID NO: 5452 - DNA, 24 bp, Yaba-like disease virus
tcaatgggtttgtggcctttgcca

SEQ ID NO: 5453 - DNA, 24 bp, Yaba-like disease virus
gtccagtacccatgatactggcat

SEQ ID NO: 5454 - DNA, 19 bp, Homo sapiens
tcaatggtttgtggccctt

SEQ ID NO: 5455 - DNA, 18 bp, Homo sapiens
tgggtttgtagctccctg

SEQ ID NO: 5456 - DNA, 16 bp, Homo sapiens
gggcctgtctttgcca

SEQ ID NO: 5457 - DNA, 19 bp, Homo sapiens
tcaattgtaggcttttgcc

SEQ ID NO: 5458 - DNA, 19 bp, Homo sapiens
aattaaattgtggcctttg

SEQ ID NO: 5459 - DNA, 17 bp, Homo sapiens
tcaaagggtagcctttg

SEQ ID NO: 5460 - DNA, 15 bp, Homo sapiens
gtccagtatgattgg

SEQ ID NO: 5461 - DNA, 16 bp, Homo sapiens
atccagtactactggc

SEQ ID NO: 5462 - DNA, 63 bp, Yaba-like disease virus
gagaacagatgaggtcgtcgcagaaaatctcctgtataatggaaggggatcatcatctgtctt

SEQ ID NO: 5463 - DNA, 24 bp, Yaba-like disease virus
tataatggaaggggatcatcatct

SEQ ID NO: 5464 - DNA, 24 bp, Yaba-like disease virus
aacagatgaggtcgtcgcagaaaa

SEQ ID NO: 5465 - DNA, 21 bp, Homo sapiens
atagttgaagaaccatcatct

SEQ ID NO: 5466 - DNA, 19 bp, Homo sapiens
tataatggtgatccatcat

SEQ ID NO: 5467 - DNA, 21 bp, Homo sapiens
tgataggggacccagttatct

SEQ ID NO: 5468 - DNA, 15 bp, Homo sapiens
tggtgggacatcatc

SEQ ID NO: 5469 - DNA, 20 bp, Homo sapiens
aacagaagagcaagcagaaa

SEQ ID NO: 5470 - DNA, 18 bp, Homo sapiens
cagatgaggttgttgaga

SEQ ID NO: 5471 - DNA, 18 bp, Homo sapiens
caaatgaggagcctggga

SEQ ID NO: 5472 - DNA, 18 bp, Homo sapiens
agatgaggggcatggaga

SEQ ID NO: 5473 - DNA, 17 bp, Homo sapiens
gaagatgaggccggcag

SEQ ID NO: 5474 - DNA, 24 bp, Homo sapiens
aacagatgagacagactgcagaaa

SEQ ID NO: 5475 - DNA, 15 bp, Homo sapiens
aacagatgggggtgc

SEQ ID NO: 5476 - DNA, 18 bp, Homo sapiens
cagatgaggttgtcccag

SEQ ID NO: 5477 - DNA, 18 bp, Homo sapiens
agtaaggtggggcagaaa

SEQ ID NO: 5478 - DNA, 18 bp, Homo sapiens
cagggaggagtggcagaa

SEQ ID NO: 5479 - DNA, 22 bp, Homo sapiens
aacagatgagattatatgaaaa

SEQ ID NO: 5480 - DNA, 18 bp, Homo sapiens
cagatgagtctcagtaga

SEQ ID NO: 5481 - DNA, 21 bp, Homo sapiens
aggtgacatcatcgcggaaaa

SEQ ID NO: 5482 - DNA, 19 bp, Homo sapiens
aacagatggggccgtgaga

SEQ ID NO: 5483 - DNA, 17 bp, Homo sapiens
aacagatgggaacagaa

SEQ ID NO: 5484 - DNA, 16 bp, Homo sapiens
cagatgaggtgtagaa

SEQ ID NO: 5485 - DNA, 15 bp, Homo sapiens
acagatgatgcagaa

SEQ ID NO: 5486 - DNA, 17 bp, Homo sapiens
cagtgaggaagccagag

SEQ ID NO: 5487 - DNA, 24 bp, Homo sapiens
caaatgagtcggagttgtagaaaa

SEQ ID NO: 5488 - DNA, 19 bp, Homo sapiens
aacagatggtgaatccaga

SEQ ID NO: 5489 - DNA, 16 bp, Homo sapiens
cagatgaggccagaaa

SEQ ID NO: 5490 - DNA, 17 bp, Homo sapiens
atgggtgactgcagaaa

SEQ ID NO: 5491 - DNA, 23 bp, Homo sapiens
aacagatgatggagatgcagaaa

SEQ ID NO: 5492 - DNA, 21 bp, Homo sapiens
gatgaggcttatttcgcagaa

SEQ ID NO: 5493 - DNA, 17 bp, Homo sapiens
gatggggcaacagaaaa

SEQ ID NO: 5494 - DNA, 21 bp, Homo sapiens
acaaatgaggtggcagagcag

SEQ ID NO: 5495 - DNA, 19 bp, Homo sapiens
acagatggggttgacaaaa

SEQ ID NO: 5496 - DNA, 16 bp, Homo sapiens
cagtgaaagccgcaga

SEQ ID NO: 5497 - DNA, 18 bp, Homo sapiens
cagatgagtcagttgcag

SEQ ID NO: 5498 - DNA, 17 bp, Homo sapiens
agatgagaatgtagaaa

SEQ ID NO: 5499 - DNA, 15 bp, Homo sapiens
acagatgagatagaa

SEQ ID NO: 5500 - DNA, 23 bp, Homo sapiens
aacaaatgattgggcgcggggaa

SEQ ID NO: 5501 - DNA, 110 bp, Yaba-like disease virus
tatccaatatgttgttgtgaatggcacagatgtatttctggaacagccctgtcagtttttccaagaggcctatccaacaatttgtgccagtcacaggagcatgctggatg

SEQ ID NO: 5502 - DNA, 24 bp, Yaba-like disease virus
tccaatatgttgttgtgaatggca

SEQ ID NO: 5503 - DNA, 24 bp, Yaba-like disease virus
aacaatttgtgccagtcacaggag

SEQ ID NO: 5504 - DNA, 18 bp, Homo sapiens
aatttgtaagccacacgg

SEQ ID NO: 5505 - DNA, 19 bp, Homo sapiens
aacaacttgtgttagtcac

SEQ ID NO: 5506 - DNA, 20 bp, Homo sapiens
acattcatgggtcacaggag

SEQ ID NO: 5507 - DNA, 21 bp, Homo sapiens
aacatataccagttatgggag

SEQ ID NO: 5508 - DNA, 21 bp, Homo sapiens
aaccgcccaaccggtcacagg

SEQ ID NO: 5509 - DNA, 80 bp, Yaba-like disease virus
atcactcaattccagaccctgcctacgagtataggagcactatcaatccctgggcatcacaggtggggtccttgggtgat

SEQ ID NO: 5510 - DNA, 24 bp, Yaba-like disease virus
catcacaggtggggtccttgggtg

SEQ ID NO: 5511 - DNA, 24 bp, Yaba-like disease virus
accctgcctacgagtataggagca

SEQ ID NO: 5512 - DNA, 21 bp, Homo sapiens
catccactgtgtccttgggtg

SEQ ID NO: 5513 - DNA, 18 bp, Homo sapiens
ggcagacatccttgggtg

SEQ ID NO: 5514 - DNA, 19 bp, Homo sapiens
tcacaggttggggtccccg

SEQ ID NO: 5515 - DNA, 18 bp, Homo sapiens
ctacctgtgacaagagca

SEQ ID NO: 5516 - DNA, 15 bp, Homo sapiens
ctgcctgttaagagc

SEQ ID NO: 5517 - DNA, 24 bp, Homo sapiens
ccctgcctgcagccggcgggagca

SEQ ID NO: 5518 - DNA, 21 bp, Homo sapiens
ccctgcctgtgggccacagca

SEQ ID NO: 5519 - DNA, 16 bp, Homo sapiens
actctccttataggag

SEQ ID NO: 5520 - DNA, 17 bp, Homo sapiens
ccctgcctgtgagatgg

SEQ ID NO: 5521 - DNA, 112 bp, Amsacta moorei entomopoxvirus
ggccgccgcgcgcccccgcccggccgccgcgcgcccccgcccggccgccgcgcgcccccgcccggccgccgcgcgcccccgcccggccgccgcgcgcccccgcccggccgcc

SEQ ID NO: 5522 - DNA, 24 bp, Amsacta moorei entomopoxvirus
ccgccgcgcgcccccgcccggccg

SEQ ID NO: 5523 - DNA, 24 bp, Amsacta moorei entomopoxvirus
ccgcccggccgccgcgcgcccccg

SEQ ID NO: 5524 - DNA, 17 bp, Homo sapiens
cctctgcgcgccccgcc

SEQ ID NO: 5525 - DNA, 18 bp, Homo sapiens
ccgccgcccggcccggcc

SEQ ID NO: 5526 - DNA, 27 bp, Homo sapiens
ccgcacgcgcgccccacgcttcggccg

SEQ ID NO: 5527 - DNA, 22 bp, Homo sapiens
ccgccgcagcgctcccagcccg

SEQ ID NO: 5528 - DNA, 20 bp, Homo sapiens
gctgcccgcccacctggccg

SEQ ID NO: 5529 - DNA, 17 bp, Homo sapiens
ccgccgcgcgcaccggc

SEQ ID NO: 5530 - DNA, 17 bp, Homo sapiens
ccaccgcgcgccttggc

SEQ ID NO: 5531 - DNA, 23 bp, Homo sapiens
cctccgcgtgctctcgcctaccg

SEQ ID NO: 5532 - DNA, 16 bp, Homo sapiens
gcggcgcgcccctggc

SEQ ID NO: 5533 - DNA, 22 bp, Homo sapiens
ccggctccgcttcgcctggccg

SEQ ID NO: 5534 - DNA, 23 bp, Homo sapiens
ccgccgcagcgtcacagcggccg

SEQ ID NO: 5535 - DNA, 19 bp, Homo sapiens
gccgcgcgtccagaccggc

SEQ ID NO: 5536 - DNA, 20 bp, Homo sapiens
cgccgcgcgcgcccgggccg

SEQ ID NO: 5537 - DNA, 18 bp, Homo sapiens
ccgccgcgcgtccgcgcc

SEQ ID NO: 5538 - DNA, 22 bp, Homo sapiens
gctgccccccgccgtctggccg

SEQ ID NO: 5539 - DNA, 18 bp, Homo sapiens
ccgccgcgtcttcccgcc

SEQ ID NO: 5540 - DNA, 19 bp, Homo sapiens
ccgcgcgcgtccgggcggc

SEQ ID NO: 5541 - DNA, 19 bp, Homo sapiens
ccgccgccgcccccagtcg

SEQ ID NO: 5542 - DNA, 23 bp, Homo sapiens
ccgccgctgccctcgcccggccg

SEQ ID NO: 5543 - DNA, 19 bp, Homo sapiens
ccgcgcgcccctcgcgtcg

SEQ ID NO: 5544 - DNA, 20 bp, Homo sapiens
ccgccgcgcgcgcccctccg

SEQ ID NO: 5545 - DNA, 16 bp, Homo sapiens
ccgccgccgctccggc

SEQ ID NO: 5546 - DNA, 19 bp, Homo sapiens
gctgcgcgccctggtgccg

SEQ ID NO: 5547 - DNA, 24 bp, Homo sapiens
ccgccgcgcgcctccagctcctcc

SEQ ID NO: 5548 - DNA, 21 bp, Homo sapiens
ccgccgccgcccccgaagtcg

SEQ ID NO: 5549 - DNA, 23 bp, Homo sapiens
ccgccgccgccgcctcccggccg

SEQ ID NO: 5550 - DNA, 20 bp, Homo sapiens
cgctcttctccgcccggccg

SEQ ID NO: 5551 - DNA, 21 bp, Homo sapiens
ccgccgctcgcccccggcacg

SEQ ID NO: 5552 - DNA, 21 bp, Homo sapiens
gccgccgccgccgcccggccg

SEQ ID NO: 5553 - DNA, 20 bp, Homo sapiens
ccgcccgcgctccccggccg

SEQ ID NO: 5554 - DNA, 22 bp, Homo sapiens
ccgccgcggctcccgccccccg

SEQ ID NO: 5555 - DNA, 17 bp, Homo sapiens
ccggcgcgcgccccgcc

SEQ ID NO: 5556 - DNA, 17 bp, Homo sapiens
cctccgcgcgctgcggc

SEQ ID NO: 5557 - DNA, 19 bp, Homo sapiens
ccgccgcggccctccggcc

SEQ ID NO: 5558 - DNA, 22 bp, Homo sapiens
ccgccgtccgccggcccggccg

SEQ ID NO: 5559 - DNA, 18 bp, Homo sapiens
ccccgcggggcgcccggc

SEQ ID NO: 5560 - DNA, 18 bp, Homo sapiens
ccgccgcgccgcttccgc

SEQ ID NO: 5561 - DNA, 18 bp, Homo sapiens
acgcgcagggcccggccg

SEQ ID NO: 5562 - DNA, 22 bp, Homo sapiens
ccgcccgcgccggacccggccg

SEQ ID NO: 5563 - DNA, 21 bp, Homo sapiens
ccgccgcgctcccctagcccg

SEQ ID NO: 5564 - DNA, 21 bp, Homo sapiens
ccgcccgcgcccccgcccccg

SEQ ID NO: 5565 - DNA, 15 bp, Homo sapiens
gcccgcgcccccccg

SEQ ID NO: 5566 - DNA, 23 bp, Homo sapiens
ccgccccgcgccccctgcagccg

SEQ ID NO: 5567 - DNA, 20 bp, Homo sapiens
ccgcgcgcgccctcgcagcc

SEQ ID NO: 5568 - DNA, 18 bp, Homo sapiens
ccgccgcccgctcccccg

SEQ ID NO: 5569 - DNA, 18 bp, Homo sapiens
ccgctcgcgcccctcccg

SEQ ID NO: 5570 - DNA, 24 bp, Homo sapiens
ccgcggccatggcccgctcggccg

SEQ ID NO: 5571 - DNA, 21 bp, Homo sapiens
ccgcccgcgccccgccggccg

SEQ ID NO: 5572 - DNA, 18 bp, Homo sapiens
cccccgcgcgccccggcc

SEQ ID NO: 5573 - DNA, 21 bp, Homo sapiens
ccgccgcgctttcccgcttcg

SEQ ID NO: 5574 - DNA, 18 bp, Homo sapiens
ccgtccgtgctcccagcc

SEQ ID NO: 5575 - DNA, 18 bp, Homo sapiens
ccgcccgcgctcctcccg

SEQ ID NO: 5576 - DNA, 19 bp, Homo sapiens
cgtcgcgcgcccccgggcc

SEQ ID NO: 5577 - DNA, 19 bp, Homo sapiens
gccgctgcccccgccgccg

SEQ ID NO: 5578 - DNA, 18 bp, Homo sapiens
cggcgcgcgcctcgggcc

SEQ ID NO: 5579 - DNA, 24 bp, Homo sapiens
ccgccgcgccccgccccccggccg

SEQ ID NO: 5580 - DNA, 22 bp, Homo sapiens
ccgccgccgccgatcccggccg

SEQ ID NO: 5581 - DNA, 21 bp, Homo sapiens
ccgccgccgcctccccggccg

SEQ ID NO: 5582 - DNA, 24 bp, Homo sapiens
ccggtagcgcatcctgcccggccg

SEQ ID NO: 5583 - DNA, 17 bp, Homo sapiens
gccgtgccccctccccg

SEQ ID NO: 5584 - DNA, 15 bp, Homo sapiens
ccgcgcgcctcagcc

SEQ ID NO: 5585 - DNA, 17 bp, Homo sapiens
cccgcgccggcccggcc

SEQ ID NO: 5586 - DNA, 21 bp, Homo sapiens
ccgctgctcgctgcccggccg

SEQ ID NO: 5587 - DNA, 19 bp, Homo sapiens
ccgccgcggtgcctctccg

SEQ ID NO: 5588 - DNA, 23 bp, Homo sapiens
ccgccgcgtccctctccaccggc

SEQ ID NO: 5589 - DNA, 24 bp, Homo sapiens
ccgccgcgtgccgcgccccggccg

SEQ ID NO: 5590 - DNA, 16 bp, Homo sapiens
ccgctgcgcgctcggc

SEQ ID NO: 5591 - DNA, 18 bp, Homo sapiens
ccgccgcggagctccggc

SEQ ID NO: 5592 - DNA, 24 bp, Homo sapiens
ccgccgcgctgcaaaccgctcggc

SEQ ID NO: 5593 - DNA, 19 bp, Homo sapiens
cctcgcgccgtgcccggcc

SEQ ID NO: 5594 - DNA, 17 bp, Homo sapiens
ccgccgcgcagctcggc

SEQ ID NO: 5595 - DNA, 18 bp, Homo sapiens
ccgcgcgcgctcccggcc

SEQ ID NO: 5596 - DNA, 18 bp, Homo sapiens
ccgcgcgcaagcctggcc

SEQ ID NO: 5597 - DNA, 22 bp, Homo sapiens
ccgccgcgcgccctacgcgccg

SEQ ID NO: 5598 - DNA, 22 bp, Homo sapiens
gctgcgcgccctgcttcggtcg

SEQ ID NO: 5599 - DNA, 19 bp, Homo sapiens
gctgcacgccccagggtcg

SEQ ID NO: 5600 - DNA, 20 bp, Homo sapiens
ccggcgtgcgcccccggccc

SEQ ID NO: 5601 - DNA, 17 bp, Homo sapiens
ccgcgcgcgccctcacc

SEQ ID NO: 5602 - DNA, 18 bp, Homo sapiens
ccgccgctgtccccgccc

SEQ ID NO: 5603 - DNA, 21 bp, Homo sapiens
ccgccgcgcagtccccgaccc

SEQ ID NO: 5604 - DNA, 16 bp, Homo sapiens
gccgcgcgctcgctcg

SEQ ID NO: 5605 - DNA, 21 bp, Homo sapiens
ccgccgcgggctccctcctcg

SEQ ID NO: 5606 - DNA, 20 bp, Homo sapiens
ccgccgcgctccttgatccg

SEQ ID NO: 5607 - DNA, 22 bp, Homo sapiens
cctccgcgcgcctccccggccg

SEQ ID NO: 5608 - DNA, 19 bp, Homo sapiens
ccgctccgcgttcccaacc

SEQ ID NO: 5609 - DNA, 15 bp, Homo sapiens
cgccgcgcgcccggc

SEQ ID NO: 5610 - DNA, 18 bp, Homo sapiens
cgccgcgcgccctccccg

SEQ ID NO: 5611 - DNA, 17 bp, Homo sapiens
ccgccgcgccggctggc

SEQ ID NO: 5612 - DNA, 19 bp, Homo sapiens
gctgcgcgcccctctcacc

SEQ ID NO: 5613 - DNA, 16 bp, Homo sapiens
ccgccggcgccccggc

SEQ ID NO: 5614 - DNA, 19 bp, Homo sapiens
ccgcccgcgcgctctcgcc

SEQ ID NO: 5615 - DNA, 18 bp, Homo sapiens
ccgccgtcgctctccccg

SEQ ID NO: 5616 - DNA, 23 bp, Homo sapiens
ccgcccctagctccgcccggccg

SEQ ID NO: 5617 - DNA, 23 bp, Homo sapiens
ccggcccggccgtcaggcccccg

SEQ ID NO: 5618 - DNA, 23 bp, Homo sapiens
ccgcccagggcggccgcgtctcc

SEQ ID NO: 5619 - DNA, 17 bp, Homo sapiens
ccgcccggccccgctcg

SEQ ID NO: 5620 - DNA, 19 bp, Homo sapiens
ccgcttggccgccgctgcc

SEQ ID NO: 5621 - DNA, 16 bp, Homo sapiens
ccgcgcggccggcccc

SEQ ID NO: 5622 - DNA, 18 bp, Homo sapiens
cccggccaccccgtgccc

SEQ ID NO: 5623 - DNA, 17 bp, Homo sapiens
ccgccggccgctgctcg

SEQ ID NO: 5624 - DNA, 28 bp, Homo sapiens
ccatccggccgccgcgcactcacctccg

SEQ ID NO: 5625 - DNA, 19 bp, Homo sapiens
ccgctgcggctgcggctcc

SEQ ID NO: 5626 - DNA, 18 bp, Homo sapiens
cctcccggccgccggcgc

SEQ ID NO: 5627 - DNA, 18 bp, Homo sapiens
cgcccggccgtcgccgcc

SEQ ID NO: 5628 - DNA, 18 bp, Homo sapiens
cccccggccgctgcatcc

SEQ ID NO: 5629 - DNA, 19 bp, Homo sapiens
ccgcccgcccgccgccgcc

SEQ ID NO: 5630 - DNA, 23 bp, Homo sapiens
ccgctcgcgccgccgcccctccc

SEQ ID NO: 5631 - DNA, 22 bp, Homo sapiens
ccgcccggccgggctgcccccg

SEQ ID NO: 5632 - DNA, 18 bp, Homo sapiens
ccgcccaggcctcgccgc

SEQ ID NO: 5633 - DNA, 21 bp, Homo sapiens
cgctcggccgccgccgcctcc

SEQ ID NO: 5634 - DNA, 19 bp, Homo sapiens
ccgaccggcgggcgccccc

SEQ ID NO: 5635 - DNA, 20 bp, Homo sapiens
cgtccgcccgccgcaggggc

SEQ ID NO: 5636 - DNA, 18 bp, Homo sapiens
ccgccccgccccgccccc

SEQ ID NO: 5637 - DNA, 17 bp, Homo sapiens
ccgcctgcgccgccgcc

SEQ ID NO: 5638 - DNA, 24 bp, Homo sapiens
ccgccgggttgttacttgcctccg

SEQ ID NO: 5639 - DNA, 20 bp, Homo sapiens
ccgcccgtgccgccgccgcc

SEQ ID NO: 5640 - DNA, 24 bp, Homo sapiens
ccgcccaggctgctcctgcctccg

SEQ ID NO: 5641 - DNA, 19 bp, Homo sapiens
gcccggccgccgagtctcc

SEQ ID NO: 5642 - DNA, 23 bp, Homo sapiens
cgcccggccgctcgcagcctccg

SEQ ID NO: 5643 - DNA, 23 bp, Homo sapiens
ccgctgggtttccagcgccctcg

SEQ ID NO: 5644 - DNA, 17 bp, Homo sapiens
ccctccggccgcgaccc

SEQ ID NO: 5645 - DNA, 18 bp, Homo sapiens
ccgcccgccgccgctccg

SEQ ID NO: 5646 - DNA, 17 bp, Homo sapiens
gccggccgccgtagccc

SEQ ID NO: 5647 - DNA, 18 bp, Homo sapiens
ccgcacggtcccgctccc

SEQ ID NO: 5648 - DNA, 22 bp, Homo sapiens
ccgctcggctcgcgctcctccg

SEQ ID NO: 5649 - DNA, 18 bp, Homo sapiens
ccgcccgccgccgccgcc

SEQ ID NO: 5650 - DNA, 18 bp, Homo sapiens
ccgcccgcccgccgcccg

SEQ ID NO: 5651 - DNA, 20 bp, Homo sapiens
ccgcctcggccgcccccgcc

SEQ ID NO: 5652 - DNA, 20 bp, Homo sapiens
ccgcgcggccgcccgacccc

SEQ ID NO: 5653 - DNA, 23 bp, Homo sapiens
ccgctcagccgccaggccttccg

SEQ ID NO: 5654 - DNA, 19 bp, Homo sapiens
ccgccgcggccgcgcttcc

SEQ ID NO: 5655 - DNA, 21 bp, Homo sapiens
ccgcccgccgccgccgcggcc

SEQ ID NO: 5656 - DNA, 18 bp, Homo sapiens
cctcccggccgcccctcg

SEQ ID NO: 5657 - DNA, 18 bp, Homo sapiens
cccccggccgccgctgcc

SEQ ID NO: 5658 - DNA, 19 bp, Homo sapiens
cgcccggccccgcggagcc

SEQ ID NO: 5659 - DNA, 19 bp, Homo sapiens
cccctcggccgccgccgcc

SEQ ID NO: 5660 - DNA, 21 bp, Homo sapiens
ccgctcgcgccgccgcccccg

SEQ ID NO: 5661 - DNA, 18 bp, Homo sapiens
ccgccccggccgccgcgc

SEQ ID NO: 5662 - DNA, 21 bp, Homo sapiens
cccggccgtccgccgccctcg

SEQ ID NO: 5663 - DNA, 17 bp, Homo sapiens
ccgccacggccggcccc

SEQ ID NO: 5664 - DNA, 23 bp, Homo sapiens
ccgcccgggccgccggcagctcc

SEQ ID NO: 5665 - DNA, 16 bp, Homo sapiens
cgccgccgccggcccc

SEQ ID NO: 5666 - DNA, 22 bp, Homo sapiens
ccccctggcagcggcgcctccg

SEQ ID NO: 5667 - DNA, 18 bp, Homo sapiens
ccgtccgccgccgccgcc

SEQ ID NO: 5668 - DNA, 19 bp, Homo sapiens
ccgcccggcccggctctcc

SEQ ID NO: 5669 - DNA, 21 bp, Homo sapiens
ccgcccggctccggcccctcg

SEQ ID NO: 5670 - DNA, 22 bp, Homo sapiens
ccgcctgcccgccgccgccccc

SEQ ID NO: 5671 - DNA, 19 bp, Homo sapiens
ccgcctcggccgccgcccg

SEQ ID NO: 5672 - DNA, 19 bp, Homo sapiens
ccgcccgccgcggccctcc

SEQ ID NO: 5673 - DNA, 18 bp, Homo sapiens
ccgcccggtcgcgcgtcc

SEQ ID NO: 5674 - DNA, 19 bp, Homo sapiens
ccgcctcggccgccgctcg

SEQ ID NO: 5675 - DNA, 21 bp, Homo sapiens
ccgcccggccccgctgagggc

SEQ ID NO: 5676 - DNA, 21 bp, Homo sapiens
ccgcccggctccaggcgcccc

SEQ ID NO: 5677 - DNA, 21 bp, Homo sapiens
ccgcccggcacggcagtcccc

SEQ ID NO: 5678 - DNA, 18 bp, Homo sapiens
ccgccgggctgcagcccc

SEQ ID NO: 5679 - DNA, 17 bp, Homo sapiens
cctccggccgccgcccg

SEQ ID NO: 5680 - DNA, 18 bp, Homo sapiens
cgctcggccgccgccgcc

SEQ ID NO: 5681 - DNA, 25 bp, Homo sapiens
ccgccggccgcggcctgcgctcccg

SEQ ID NO: 5682 - DNA, 24 bp, Homo sapiens
ccgtcccggctgccgggcgtctcc

SEQ ID NO: 5683 - DNA, 21 bp, Homo sapiens
gctcggccgcccgcgcccccg

SEQ ID NO: 5684 - DNA, 18 bp, Homo sapiens
cgtcggccgccgcgcacc

SEQ ID NO: 5685 - DNA, 17 bp, Homo sapiens
cgcccggccccactccc

SEQ ID NO: 5686 - DNA, 18 bp, Homo sapiens
ccgcccggccccgccgcc

SEQ ID NO: 5687 - DNA, 17 bp, Homo sapiens
gccccgccgccgccgcc

SEQ ID NO: 5688 - DNA, 20 bp, Homo sapiens
ccgcctcggccgccgccgcc

SEQ ID NO: 5689 - DNA, 18 bp, Homo sapiens
cctccccgcgcgcgcccc

SEQ ID NO: 5690 - DNA, 20 bp, Homo sapiens
ccgaccggccgctggaggcc

SEQ ID NO: 5691 - DNA, 18 bp, Homo sapiens
ccagctcggccgcccccc

SEQ ID NO: 5692 - DNA, 22 bp, Homo sapiens
ccgcccgccgcccgctcccccg

SEQ ID NO: 5693 - DNA, 16 bp, Homo sapiens
ggccccgccgcccccg

SEQ ID NO: 5694 - DNA, 24 bp, Homo sapiens
ccgcccgggccgccgccggccccc

SEQ ID NO: 5695 - DNA, 17 bp, Homo sapiens
gcccggccctcagcccc

SEQ ID NO: 5696 - DNA, 21 bp, Homo sapiens
ccgaccggccgccgcctcccc

SEQ ID NO: 5697 - DNA, 20 bp, Homo sapiens
cgcccggctcagacctcccg

SEQ ID NO: 5698 - DNA, 21 bp, Homo sapiens
ccgcgtggccgcccgcgcccc

SEQ ID NO: 5699 - DNA, 20 bp, Homo sapiens
ccgccggccgccgcctcacc

SEQ ID NO: 5700 - DNA, 19 bp, Homo sapiens
gccaggcacaccgcgcccc

SEQ ID NO: 5701 - DNA, 22 bp, Homo sapiens
ccgcccggccgcccggagcccc

SEQ ID NO: 5702 - DNA, 15 bp, Homo sapiens
ccgcccggcggcccc

SEQ ID NO: 5703 - DNA, 31 bp, Homo sapiens
ccggccggcccatggcgtcgcgcgcccccgc

SEQ ID NO: 5704 - DNA, 16 bp, Homo sapiens
ccgcaccggcagcgcc

SEQ ID NO: 5705 - DNA, 19 bp, Homo sapiens
ccgcccgcttgccgcgggc

SEQ ID NO: 5706 - DNA, 18 bp, Homo sapiens
cccggccgccgtcttccc

SEQ ID NO: 5707 - DNA, 20 bp, Homo sapiens
ccgcctggcgctcgggctcc

SEQ ID NO: 5708 - DNA, 19 bp, Homo sapiens
ccgcccgctcgcggccccc

SEQ ID NO: 5709 - DNA, 21 bp, Homo sapiens
gccgggccgccgccgcctccg

SEQ ID NO: 5710 - DNA, 24 bp, Homo sapiens
ccgccggccgctggggcgctcccg

SEQ ID NO: 5711 - DNA, 21 bp, Homo sapiens
cgcccggcgccggagcccccg

SEQ ID NO: 5712 - DNA, 18 bp, Homo sapiens
cccccggccgctgccacc

SEQ ID NO: 5713 - DNA, 16 bp, Homo sapiens
gccggtccccgccccc

SEQ ID NO: 5714 - DNA, 23 bp, Homo sapiens
cctggctgccgcgccccactccg

SEQ ID NO: 5715 - DNA, 17 bp, Homo sapiens
cgctcgccgccgccgcc

SEQ ID NO: 5716 - DNA, 19 bp, Homo sapiens
ccgctcgcccgccagcccc

SEQ ID NO: 5717 - DNA, 18 bp, Homo sapiens
ccctctggccgccgctcc

SEQ ID NO: 5718 - DNA, 19 bp, Homo sapiens
cccggccgccgcccctccg

SEQ ID NO: 5719 - DNA, 17 bp, Homo sapiens
ccgcccgccgcccttcc

SEQ ID NO: 5720 - DNA, 19 bp, Homo sapiens
ccgctcagccgccgccgcc

SEQ ID NO: 5721 - DNA, 21 bp, Homo sapiens
ccgcccggcccccggcccccg

SEQ ID NO: 5722 - DNA, 18 bp, Homo sapiens
cccccgggcccgcgctcc

SEQ ID NO: 5723 - DNA, 21 bp, Homo sapiens
ccgccccgccgctccagctcc

SEQ ID NO: 5724 - DNA, 19 bp, Homo sapiens
cgcccggctgctgcggggc

SEQ ID NO: 5725 - DNA, 19 bp, Homo sapiens
ccgaccggccggcgcctcc

SEQ ID NO: 5726 - DNA, 23 bp, Homo sapiens
ccgcccgccgcccccggccctcg

SEQ ID NO: 5727 - DNA, 18 bp, Homo sapiens
ccgccccggcccgccccc

SEQ ID NO: 5728 - DNA, 18 bp, Homo sapiens
ccggccggctgctgctcg

SEQ ID NO: 5729 - DNA, 18 bp, Homo sapiens
ccgccggccgctctcccc

SEQ ID NO: 5730 - DNA, 20 bp, Homo sapiens
ccggcccggctgcctgtgcg

SEQ ID NO: 5731 - DNA, 17 bp, Homo sapiens
cccccggccgctgggcc

SEQ ID NO: 5732 - DNA, 16 bp, Homo sapiens
ccgcctggctgcgacc

SEQ ID NO: 5733 - DNA, 18 bp, Homo sapiens
gcctgcctgccggtgccc

SEQ ID NO: 5734 - DNA, 16 bp, Homo sapiens
ccctggtcccgccccc

SEQ ID NO: 5735 - DNA, 17 bp, Homo sapiens
cgtccggccgcccgggc

SEQ ID NO: 5736 - DNA, 18 bp, Homo sapiens
gcccggccgccggctccc

SEQ ID NO: 5737 - DNA, 20 bp, Homo sapiens
ccgccgcggccgccgccgcc

SEQ ID NO: 5738 - DNA, 17 bp, Homo sapiens
gcccggccgccgctgcc

SEQ ID NO: 5739 - DNA, 18 bp, Homo sapiens
ccacctggtcccgctccc

SEQ ID NO: 5740 - DNA, 21 bp, Homo sapiens
ccgcccgggtgcgcctctccg

SEQ ID NO: 5741 - DNA, 19 bp, Homo sapiens
ccagtccgcgcgcgctccc

SEQ ID NO: 5742 - DNA, 18 bp, Homo sapiens
ccgcccggtctcagctcc

SEQ ID NO: 5743 - DNA, 21 bp, Homo sapiens
ccgcgcggccgcttcctcccg

SEQ ID NO: 5744 - DNA, 17 bp, Homo sapiens
gctccgccgccgccgcc

SEQ ID NO: 5745 - DNA, 17 bp, Homo sapiens
ccgcccggccgcctccc

SEQ ID NO: 5746 - DNA, 18 bp, Homo sapiens
cgtcccggccgctggcgc

SEQ ID NO: 5747 - DNA, 17 bp, Homo sapiens
cccggccgcctcgtccc

SEQ ID NO: 5748 - DNA, 19 bp, Homo sapiens
cccgcgccgcgcgctcccg

SEQ ID NO: 5749 - DNA, 20 bp, Homo sapiens
ccgctggccgccgcctcagc

SEQ ID NO: 5750 - DNA, 22 bp, Homo sapiens
cccccggccgctcccgctcccg

SEQ ID NO: 5751 - DNA, 19 bp, Homo sapiens
ccgcccagccgcgcccccc

SEQ ID NO: 5752 - DNA, 18 bp, Homo sapiens
ccgcccgccgctgtcccc

SEQ ID NO: 5753 - DNA, 19 bp, Homo sapiens
ccgtcggccgccgcgagcc

SEQ ID NO: 5754 - DNA, 16 bp, Homo sapiens
gcccagccgccctccc

SEQ ID NO: 5755 - DNA, 22 bp, Homo sapiens
ccgcccgggccgccatcttccc

SEQ ID NO: 5756 - DNA, 18 bp, Homo sapiens
ccgcccgccgccgcctcg

SEQ ID NO: 5757 - DNA, 21 bp, Homo sapiens
ccgcctcggccgcctcccccg

SEQ ID NO: 5758 - DNA, 18 bp, Homo sapiens
cccccggccgccgccgcc

SEQ ID NO: 5759 - DNA, 21 bp, Homo sapiens
ccgctgcggtcgccaaggccc

SEQ ID NO: 5760 - DNA, 22 bp, Homo sapiens
ccgaccggcggcggtgccctcg

SEQ ID NO: 5761 - DNA, 23 bp, Homo sapiens
ccgccgcggcccgggcgcccccg

SEQ ID NO: 5762 - DNA, 22 bp, Homo sapiens
gcccggccctgcagggcgctcc

SEQ ID NO: 5763 - DNA, 16 bp, Homo sapiens
ggccgccgcccttccg

SEQ ID NO: 5764 - DNA, 19 bp, Homo sapiens
gcctggggaccgcgccccc

SEQ ID NO: 5765 - DNA, 24 bp, Homo sapiens
ccgccccgccgccgccgagtcccg

SEQ ID NO: 5766 - DNA, 17 bp, Homo sapiens
cccccggccggggcccc

SEQ ID NO: 5767 - DNA, 17 bp, Homo sapiens
cgcccggtcgcccgccc

SEQ ID NO: 5768 - DNA, 15 bp, Homo sapiens
ccgcgcggcccgccc

SEQ ID NO: 5769 - DNA, 23 bp, Homo sapiens
ccgctcggccgcgcgcagtcccg

SEQ ID NO: 5770 - DNA, 21 bp, Homo sapiens
cctccggccgcgctccttccg

SEQ ID NO: 5771 - DNA, 21 bp, Homo sapiens
ccgcccggccgctcgcgcgcc

SEQ ID NO: 5772 - DNA, 17 bp, Homo sapiens
cgcccccgcccgcgcgc

SEQ ID NO: 5773 - DNA, 20 bp, Homo sapiens
ccgccggccgccgggattcc

SEQ ID NO: 5774 - DNA, 22 bp, Homo sapiens
ccgcccaggttgcctaggtccc

SEQ ID NO: 5775 - DNA, 19 bp, Homo sapiens
gcacggccgccgctggtcc

SEQ ID NO: 5776 - DNA, 18 bp, Homo sapiens
ccgcctcgccgcgccccc

SEQ ID NO: 5777 - DNA, 18 bp, Homo sapiens
cccggtcccccgcccccg

SEQ ID NO: 5778 - DNA, 16 bp, Homo sapiens
gcccggccgctgcacc

SEQ ID NO: 5779 - DNA, 62 bp, Amsacta moorei entomopoxvirus
agggactccggagaaggaaggctgctccgcgcaccggcgcgcccttctcctctcccctccct

SEQ ID NO: 5780 - DNA, 24 bp, Amsacta moorei entomopoxvirus
gcgcgcccttctcctctcccctcc

SEQ ID NO: 5781 - DNA, 24 bp, Amsacta moorei entomopoxvirus
tccggagaaggaaggctgctccgc

SEQ ID NO: 5782 - DNA, 18 bp, Homo sapiens
gcctgctctttcctctcc

SEQ ID NO: 5783 - DNA, 18 bp, Homo sapiens
gtgcgtccctctcccctc

SEQ ID NO: 5784 - DNA, 22 bp, Homo sapiens
gccgccccataccctctcctct

SEQ ID NO: 5785 - DNA, 19 bp, Homo sapiens
gcccgcagcctctcccttc

SEQ ID NO: 5786 - DNA, 16 bp, Homo sapiens
gcctctgtctcccctc

SEQ ID NO: 5787 - DNA, 18 bp, Homo sapiens
gctgcttttttcccctcc

SEQ ID NO: 5788 - DNA, 19 bp, Homo sapiens
cgctctccacctctcctcc

SEQ ID NO: 5789 - DNA, 18 bp, Homo sapiens
gcagtgcctcctctctct

SEQ ID NO: 5790 - DNA, 20 bp, Homo sapiens
gcggctcttcctctcctctc

SEQ ID NO: 5791 - DNA, 22 bp, Homo sapiens
gctcgcccttcttttctgctcc

SEQ ID NO: 5792 - DNA, 19 bp, Homo sapiens
cgtcgccttttctcccctc

SEQ ID NO: 5793 - DNA, 21 bp, Homo sapiens
gctgtattttctcctctctct

SEQ ID NO: 5794 - DNA, 22 bp, Homo sapiens
acgcgctcttcccgccccctcc

SEQ ID NO: 5795 - DNA, 26 bp, Homo sapiens
gcccttcttcttgtgtgtcccttccg

SEQ ID NO: 5796 - DNA, 19 bp, Homo sapiens
gcacgtttccctctcccct

SEQ ID NO: 5797 - DNA, 20 bp, Homo sapiens
gcccttcctgactctcctcc

SEQ ID NO: 5798 - DNA, 18 bp, Homo sapiens
gcgctctttctcctcacc

SEQ ID NO: 5799 - DNA, 19 bp, Homo sapiens
gcctctctcctctcctctc

SEQ ID NO: 5800 - DNA, 23 bp, Homo sapiens
gcccccccatgactttcccctcc

SEQ ID NO: 5801 - DNA, 19 bp, Homo sapiens
gcgctccttctcctcctcc

SEQ ID NO: 5802 - DNA, 18 bp, Homo sapiens
gcgctccttaccccctcc

SEQ ID NO: 5803 - DNA, 20 bp, Homo sapiens
gcggcccctgtctctcccct

SEQ ID NO: 5804 - DNA, 17 bp, Homo sapiens
gcccctgtctctcccct

SEQ ID NO: 5805 - DNA, 21 bp, Homo sapiens
gctgcgctttcccctcccttc

SEQ ID NO: 5806 - DNA, 15 bp, Homo sapiens
cgcttcctctcccct

SEQ ID NO: 5807 - DNA, 18 bp, Homo sapiens
gcgttccttctcctgtcc

SEQ ID NO: 5808 - DNA, 23 bp, Homo sapiens
gcgcgctcctctctctgctttcc

SEQ ID NO: 5809 - DNA, 21 bp, Homo sapiens
gctgtggcctttttcccctcc

SEQ ID NO: 5810 - DNA, 15 bp, Homo sapiens
cgcgtcctccctccc

SEQ ID NO: 5811 - DNA, 22 bp, Homo sapiens
cgcaagagttttcttttcccct

SEQ ID NO: 5812 - DNA, 22 bp, Homo sapiens
gcgcgcctcctccctcctctcc

SEQ ID NO: 5813 - DNA, 16 bp, Homo sapiens
gcggctttctctctcc

SEQ ID NO: 5814 - DNA, 20 bp, Homo sapiens
gcacgccccatgctctctct

SEQ ID NO: 5815 - DNA, 19 bp, Homo sapiens
gctccccttcctctcctct

SEQ ID NO: 5816 - DNA, 18 bp, Homo sapiens
gctgctctttccccctcc

SEQ ID NO: 5817 - DNA, 19 bp, Homo sapiens
gctgcctgtctctcccctc

SEQ ID NO: 5818 - DNA, 19 bp, Homo sapiens
cccttggcttctcccctcc

SEQ ID NO: 5819 - DNA, 19 bp, Homo sapiens
gccctccttctctttcctc

SEQ ID NO: 5820 - DNA, 25 bp, Homo sapiens
gcgcccccaccgcgctcttccctcc

SEQ ID NO: 5821 - DNA, 18 bp, Homo sapiens
gctcgcctttccccctcc

SEQ ID NO: 5822 - DNA, 17 bp, Homo sapiens
cgcaccctctcccctcc

SEQ ID NO: 5823 - DNA, 22 bp, Homo sapiens
gccgctgcctcctcttccttcc

SEQ ID NO: 5824 - DNA, 20 bp, Homo sapiens
cgtgccctcccttttcctcc

SEQ ID NO: 5825 - DNA, 18 bp, Homo sapiens
gcggctcttcttcccctc

SEQ ID NO: 5826 - DNA, 23 bp, Homo sapiens
gcggctctcgcgacctcccctcc

SEQ ID NO: 5827 - DNA, 23 bp, Homo sapiens
gctcgctctttctgtctcctctc

SEQ ID NO: 5828 - DNA, 15 bp, Homo sapiens
ggcgcttctcctttc

SEQ ID NO: 5829 - DNA, 23 bp, Homo sapiens
cgtcctcctcttcctcttccctc

SEQ ID NO: 5830 - DNA, 18 bp, Homo sapiens
cgcgcctcctcttccctc

SEQ ID NO: 5831 - DNA, 21 bp, Homo sapiens
ccgtcctcgattctcccctcc

SEQ ID NO: 5832 - DNA, 19 bp, Homo sapiens
gcctgcccttctgctctcc

SEQ ID NO: 5833 - DNA, 23 bp, Homo sapiens
gcgccccttttctagagccttcc

SEQ ID NO: 5834 - DNA, 18 bp, Homo sapiens
gcgcgcctcgccctctcc

SEQ ID NO: 5835 - DNA, 20 bp, Homo sapiens
gcgggtcctacctcccctcc

SEQ ID NO: 5836 - DNA, 21 bp, Homo sapiens
gcatcttcttctctcccctcc

SEQ ID NO: 5837 - DNA, 19 bp, Homo sapiens
gcgctgggttctcccctcc

SEQ ID NO: 5838 - DNA, 18 bp, Homo sapiens
gcctgctttcctcctctc

SEQ ID NO: 5839 - DNA, 18 bp, Homo sapiens
gcgcgcctccctcccctc

SEQ ID NO: 5840 - DNA, 22 bp, Homo sapiens
cgctgagccctcctctcctctc

SEQ ID NO: 5841 - DNA, 19 bp, Homo sapiens
gcactttcttctctcctcc

SEQ ID NO: 5842 - DNA, 22 bp, Homo sapiens
gctgctcttctcggccccctcc

SEQ ID NO: 5843 - DNA, 18 bp, Homo sapiens
gcttcctcctcttccttc

SEQ ID NO: 5844 - DNA, 20 bp, Homo sapiens
gccccctctcctcttccttc

SEQ ID NO: 5845 - DNA, 20 bp, Homo sapiens
gctgcctcccagtctcctct

SEQ ID NO: 5846 - DNA, 19 bp, Homo sapiens
gcgccactctctcctctcc

SEQ ID NO: 5847 - DNA, 20 bp, Homo sapiens
cctggaggaggaagggccgc

SEQ ID NO: 5848 - DNA, 18 bp, Homo sapiens
tccgggcagggggtccgc

SEQ ID NO: 5849 - DNA, 21 bp, Homo sapiens
cctggagaatggctgctccgc

SEQ ID NO: 5850 - DNA, 19 bp, Homo sapiens
ggagggtgctgctgctccg

SEQ ID NO: 5851 - DNA, 18 bp, Homo sapiens
ggggacggggtcttgctc

SEQ ID NO: 5852 - DNA, 18 bp, Homo sapiens
tccggagaggagggactg

SEQ ID NO: 5853 - DNA, 23 bp, Homo sapiens
tccgaagagggattttagcttcg

SEQ ID NO: 5854 - DNA, 18 bp, Homo sapiens
tcgggagaagggatctgc

SEQ ID NO: 5855 - DNA, 21 bp, Homo sapiens
tccgtggaaggaaggtcctgc

SEQ ID NO: 5856 - DNA, 21 bp, Homo sapiens
gaggaaggaagcgtcctccgc

SEQ ID NO: 5857 - DNA, 19 bp, Homo sapiens
tccgaagagggaagggcgc

SEQ ID NO: 5858 - DNA, 22 bp, Homo sapiens
cctggagaaggggcacttctgc

SEQ ID NO: 5859 - DNA, 21 bp, Homo sapiens
tccggagacggaagcacttgc

SEQ ID NO: 5860 - DNA, 23 bp, Homo sapiens
tcaggagagggaggaaccactgc

SEQ ID NO: 5861 - DNA, 16 bp, Homo sapiens
gaagaaggaggccccg

SEQ ID NO: 5862 - DNA, 18 bp, Homo sapiens
tccgaggaggatgctccg

SEQ ID NO: 5863 - DNA, 19 bp, Homo sapiens
tccggagaaggaagtttgc

SEQ ID NO: 5864 - DNA, 17 bp, Homo sapiens
ggggaggaaggcccctc

SEQ ID NO: 5865 - DNA, 18 bp, Homo sapiens
cccgggtgggggctgctc

SEQ ID NO: 5866 - DNA, 19 bp, Homo sapiens
cccggagaagggggggcgc

SEQ ID NO: 5867 - DNA, 18 bp, Homo sapiens
tccggagaggaagggggc

SEQ ID NO: 5868 - DNA, 22 bp, Homo sapiens
cggagaaacttacttgctttgc

SEQ ID NO: 5869 - DNA, 16 bp, Homo sapiens
tcctggggagctgctc

SEQ ID NO: 5870 - DNA, 19 bp, Homo sapiens
cctggagaaggaggactgc

SEQ ID NO: 5871 - DNA, 19 bp, Homo sapiens
cctggagaggggagactgc

SEQ ID NO: 5872 - DNA, 61 bp, Amsacta moorei entomopoxvirus
ggggcttggccgccgaggtgcgccccggccggaggggcccccgcacctcggcggccgcccc

SEQ ID NO: 5873 - DNA, 18 bp, Amsacta moorei entomopoxvirus
cacctcggcggccgcccc

SEQ ID NO: 5874 - DNA, 24 bp, Amsacta moorei entomopoxvirus
ccgccgaggtgcgccccggccgga

SEQ ID NO: 5875 - DNA, 21 bp, Homo sapiens
caccacggccaccagtgcccc

SEQ ID NO: 5876 - DNA, 15 bp, Homo sapiens
caccgctgccgcccc

SEQ ID NO: 5877 - DNA, 15 bp, Homo sapiens
caccgcagccgcccc

SEQ ID NO: 5878 - DNA, 18 bp, Homo sapiens
cctctttccagccgcccc

SEQ ID NO: 5879 - DNA, 18 bp, Homo sapiens
cagcccaacagccgctcc

SEQ ID NO: 5880 - DNA, 14 bp, Homo sapiens
cacccggccgcccc

SEQ ID NO: 5881 - DNA, 18 bp, Homo sapiens
acctcggcgggggcatcc

SEQ ID NO: 5882 - DNA, 18 bp, Homo sapiens
cactcagcgggctgctcc

SEQ ID NO: 5883 - DNA, 18 bp, Homo sapiens
cacctcgcagccgcgccc

SEQ ID NO: 5884 - DNA, 19 bp, Homo sapiens
caccccgtacttgcgctcc

SEQ ID NO: 5885 - DNA, 18 bp, Homo sapiens
cctcgcgctggccgcccc

SEQ ID NO: 5886 - DNA, 16 bp, Homo sapiens
cacctcaggctacccc

SEQ ID NO: 5887 - DNA, 17 bp, Homo sapiens
cgcctcccggccgcccc

SEQ ID NO: 5888 - DNA, 17 bp, Homo sapiens
cacctagaagccgcccc

SEQ ID NO: 5889 - DNA, 17 bp, Homo sapiens
cacccggcgacagcccc

SEQ ID NO: 5890 - DNA, 16 bp, Homo sapiens
caccacgagccgcccc

SEQ ID NO: 5891 - DNA, 18 bp, Homo sapiens
cctcgcggccgccgcccc

SEQ ID NO: 5892 - DNA, 16 bp, Homo sapiens
caccgcgccgcgtccc

SEQ ID NO: 5893 - DNA, 19 bp, Homo sapiens
cgcctccttcggctgcccc

SEQ ID NO: 5894 - DNA, 18 bp, Homo sapiens
cctcagcgccgccgctcc

SEQ ID NO: 5895 - DNA, 19 bp, Homo sapiens
cagctcgacaggttgcccc

SEQ ID NO: 5896 - DNA, 19 bp, Homo sapiens
acctcggcggggcggcccc

SEQ ID NO: 5897 - DNA, 18 bp, Homo sapiens
cctgcccgccgccgcccc

SEQ ID NO: 5898 - DNA, 18 bp, Homo sapiens
cacttccgagtgcgcccc

SEQ ID NO: 5899 - DNA, 18 bp, Homo sapiens
ctcagcagtggccgctcc

SEQ ID NO: 5900 - DNA, 17 bp, Homo sapiens
cgccgcatggccgcccc

SEQ ID NO: 5901 - DNA, 20 bp, Homo sapiens
ccccggcgggcgaagccgcc

SEQ ID NO: 5902 - DNA, 15 bp, Homo sapiens
cgcctcgaccgcccc

SEQ ID NO: 5903 - DNA, 18 bp, Homo sapiens
cacctcaactgctgcccc

SEQ ID NO: 5904 - DNA, 17 bp, Homo sapiens
caccccaaagccgttcc

SEQ ID NO: 5905 - DNA, 15 bp, Homo sapiens
caccctgcaagcccc

SEQ ID NO: 5906 - DNA, 18 bp, Homo sapiens
ccccgcgccatccgcccc

SEQ ID NO: 5907 - DNA, 18 bp, Homo sapiens
cccctggcggccgctccg

SEQ ID NO: 5908 - DNA, 19 bp, Homo sapiens
cctcaacaatggctgctcc

SEQ ID NO: 5909 - DNA, 17 bp, Homo sapiens
caccccgcaatagcccc

SEQ ID NO: 5910 - DNA, 18 bp, Homo sapiens
cacccttggacaggcccc

SEQ ID NO: 5911 - DNA, 16 bp, Homo sapiens
cacccgtgccagcccc

SEQ ID NO: 5912 - DNA, 19 bp, Homo sapiens
cccggcggcggctcgctcc

SEQ ID NO: 5913 - DNA, 14 bp, Homo sapiens
caccccgccgcccc

SEQ ID NO: 5914 - DNA, 17 bp, Homo sapiens
caccccagccctgcccc

SEQ ID NO: 5915 - DNA, 18 bp, Homo sapiens
acctcttgcagccgctcc

SEQ ID NO: 5916 - DNA, 17 bp, Homo sapiens
caccccggtggggcccc

SEQ ID NO: 5917 - DNA, 20 bp, Homo sapiens
acctcagcgaccttcgcccc

SEQ ID NO: 5918 - DNA, 18 bp, Homo sapiens
cctcagccgcgtcgcccc

SEQ ID NO: 5919 - DNA, 19 bp, Homo sapiens
cctcggcagggtccgcccc

SEQ ID NO: 5920 - DNA, 20 bp, Homo sapiens
cacctcagtcgccgggttcc

SEQ ID NO: 5921 - DNA, 19 bp, Homo sapiens
cacctcgaggccgggctcc

SEQ ID NO: 5922 - DNA, 18 bp, Homo sapiens
ccgcgccccggccgcccc

SEQ ID NO: 5923 - DNA, 18 bp, Homo sapiens
ctccgcgcccaccgcccc

SEQ ID NO: 5924 - DNA, 18 bp, Homo sapiens
ctcgacgatcgctgcccc

SEQ ID NO: 5925 - DNA, 20 bp, Homo sapiens
caccccggctgtcacgcccc

SEQ ID NO: 5926 - DNA, 19 bp, Homo sapiens
cacctcgggagaaggctcc

SEQ ID NO: 5927 - DNA, 19 bp, Homo sapiens
caccgcgcgccatcgtccc

SEQ ID NO: 5928 - DNA, 19 bp, Homo sapiens
cctcggcggcgctcgctcc

SEQ ID NO: 5929 - DNA, 18 bp, Homo sapiens
caccccggggcgcgcccc

SEQ ID NO: 5930 - DNA, 18 bp, Homo sapiens
cacccgcgagcctgcccc

SEQ ID NO: 5931 - DNA, 16 bp, Homo sapiens
caccccgaaccagtcc

SEQ ID NO: 5932 - DNA, 15 bp, Homo sapiens
caccttggccgcccc

SEQ ID NO: 5933 - DNA, 18 bp, Homo sapiens
caccggagcggccgctcc

SEQ ID NO: 5934 - DNA, 19 bp, Homo sapiens
acctcggcggcccggctcc

SEQ ID NO: 5935 - DNA, 17 bp, Homo sapiens
cacccgcgctgggcccc

SEQ ID NO: 5936 - DNA, 16 bp, Homo sapiens
cacccgagactgcccc

SEQ ID NO: 5937 - DNA, 18 bp, Homo sapiens
cctgctgccggccgcccc

SEQ ID NO: 5938 - DNA, 18 bp, Homo sapiens
cctcaacacggccgcccc

SEQ ID NO: 5939 - DNA, 18 bp, Homo sapiens
cctcaccacggccgcccc

SEQ ID NO: 5940 - DNA, 20 bp, Homo sapiens
cctcttggcgaccaggcccc

SEQ ID NO: 5941 - DNA, 16 bp, Homo sapiens
cgcctcgccgcgcccc

SEQ ID NO: 5942 - DNA, 21 bp, Homo sapiens
ccccggggcctgcctggccgg

SEQ ID NO: 5943 - DNA, 21 bp, Homo sapiens
cgcgacccgcgtcccggccgg

SEQ ID NO: 5944 - DNA, 22 bp, Homo sapiens
ccgccgccgctcttcggccgga

SEQ ID NO: 5945 - DNA, 23 bp, Homo sapiens
gccgaggtgtgctttgtccggcg

SEQ ID NO: 5946 - DNA, 19 bp, Homo sapiens
ccttgggggcaccggccgg

SEQ ID NO: 5947 - DNA, 19 bp, Homo sapiens
cccccgaagcctcggccgg

SEQ ID NO: 5948 - DNA, 19 bp, Homo sapiens
ccgagctgcctccggccgg

SEQ ID NO: 5949 - DNA, 23 bp, Homo sapiens
cccccggcccggccctggccgga

SEQ ID NO: 5950 - DNA, 16 bp, Homo sapiens
ccggggccccggctgg

SEQ ID NO: 5951 - DNA, 18 bp, Homo sapiens
ccgccgagctgcgctccc

SEQ ID NO: 5952 - DNA, 15 bp, Homo sapiens
cggggtcccggccgg

SEQ ID NO: 5953 - DNA, 21 bp, Homo sapiens
ccgccgggcagctcggccgga

SEQ ID NO: 5954 - DNA, 21 bp, Homo sapiens
gccggggtctagaccggccgg

SEQ ID NO: 5955 - DNA, 18 bp, Homo sapiens
ccgatggggtgcgcccca

SEQ ID NO: 5956 - DNA, 16 bp, Homo sapiens
gccgggggcgcgccgg

SEQ ID NO: 5957 - DNA, 22 bp, Homo sapiens
gcagaggtgcgcaaaacatgga

SEQ ID NO: 5958 - DNA, 17 bp, Homo sapiens
ccccggggtgcgttcgg

SEQ ID NO: 5959 - DNA, 25 bp, Homo sapiens
ccgccgaggtgtgatggggactgga

SEQ ID NO: 5960 - DNA, 23 bp, Homo sapiens
ccgcccgggtgcgcctctccgga

SEQ ID NO: 5961 - DNA, 21 bp, Homo sapiens
cctcgaggtgcgtcgcctcgg

SEQ ID NO: 5962 - DNA, 17 bp, Homo sapiens
cgtcggggcccggccgg

SEQ ID NO: 5963 - DNA, 22 bp, Homo sapiens
ccgcgccccccgccccggccgg

SEQ ID NO: 5964 - DNA, 20 bp, Homo sapiens
cgcgggggcgctccggccgg

SEQ ID NO: 5965 - DNA, 102 bp, Amsacta moorei entomopoxvirus
agaaacacgaggcgggggtcccagaaagggcaggcaggtcagccgcaccgcccgcgagccaacccgtatcctttttttctaggtgtttttgtttttgtttct

SEQ ID NO: 5966 - DNA, 24 bp, Amsacta moorei entomopoxvirus
aacccgtatcctttttttctaggt

SEQ ID NO: 5967 - DNA, 24 bp, Amsacta moorei entomopoxvirus
tcccagaaagggcaggcaggtcag

SEQ ID NO: 5968 - DNA, 21 bp, Homo sapiens
aacctatgtagttttctaggt

SEQ ID NO: 5969 - DNA, 19 bp, Homo sapiens
cgatctttttctcttaggt

SEQ ID NO: 5970 - DNA, 19 bp, Homo sapiens
cctgtcctccagcctgggt

SEQ ID NO: 5971 - DNA, 21 bp, Homo sapiens
accagcaagttttttctgggt

SEQ ID NO: 5972 - DNA, 27 bp, Homo sapiens
aacctacagacttttttttttctgggt

SEQ ID NO: 5973 - DNA, 18 bp, Homo sapiens
atctctgttctttccagg

SEQ ID NO: 5974 - DNA, 18 bp, Homo sapiens
cccagaaagggcagccgg

SEQ ID NO: 5975 - DNA, 22 bp, Homo sapiens
tccctggaacccggcaggtcag

SEQ ID NO: 5976 - DNA, 18 bp, Homo sapiens
cagagagggcaggaatgg

SEQ ID NO: 5977 - DNA, 19 bp, Homo sapiens
tctaaggaagggcagctgg

SEQ ID NO: 5978 - DNA, 21 bp, Homo sapiens
tcccaggcagggcaggggcag

SEQ ID NO: 5979 - DNA, 18 bp, Homo sapiens
tccagggcagggcagccc

SEQ ID NO: 5980 - DNA, 21 bp, Homo sapiens
ccagggaagggtggacaggtc

SEQ ID NO: 5981 - DNA, 24 bp, Homo sapiens
tctcaggaaggctgcccaggtcag

SEQ ID NO: 5982 - DNA, 17 bp, Homo sapiens
tcccgggtggacaggtc

SEQ ID NO: 5983 - DNA, 17 bp, Homo sapiens
tcccaagagggcagggg

SEQ ID NO: 5984 - DNA, 18 bp, Homo sapiens
ccccagaaggggtggtgg

SEQ ID NO: 5985 - DNA, 23 bp, Homo sapiens
tctcagaaaaggttttcagtcag

SEQ ID NO: 5986 - DNA, 17 bp, Homo sapiens
cagaaagggtgggtcaa

SEQ ID NO: 5987 - DNA, 18 bp, Homo sapiens
tctcagacaagggcaggc

SEQ ID NO: 5988 - DNA, 19 bp, Homo sapiens
tcccagaggttccaggtca

SEQ ID NO: 5989 - DNA, 17 bp, Homo sapiens
tcccggaaagggcgcgg

SEQ ID NO: 5990 - DNA, 23 bp, Homo sapiens
cccggggagggcagagcttgcag

SEQ ID NO: 5991 - DNA, 16 bp, Homo sapiens
cagaaaggaggggtca

SEQ ID NO: 5992 - DNA, 21 bp, Homo sapiens
gaggggggcatgacaggtcag

SEQ ID NO: 5993 - DNA, 18 bp, Homo sapiens
tcccaggcaaggcacagg

SEQ ID NO: 5994 - DNA, 21 bp, Homo sapiens
ccatgaggggcaggcgcacag

SEQ ID NO: 5995 - DNA, 18 bp, Homo sapiens
tcctagaagggcaggcag

SEQ ID NO: 5996 - DNA, 17 bp, Homo sapiens
tcctagaagggcaggca

SEQ ID NO: 5997 - DNA, 22 bp, Homo sapiens
tcctgaaaagggcagtgcctgg

SEQ ID NO: 5998 - DNA, 18 bp, Homo sapiens
tcccagaagagggtggag

SEQ ID NO: 5999 - DNA, 23 bp, Homo sapiens
tcccagaaagggaggcagggcag

SEQ ID NO: 6000 - DNA, 16 bp, Homo sapiens
tcccagagcaggaggt

SEQ ID NO: 6001 - DNA, 16 bp, Homo sapiens
ccaggagggggcaggc

SEQ ID NO: 6002 - DNA, 17 bp, Homo sapiens
ccccagggagacaggtc

SEQ ID NO: 6003 - DNA, 18 bp, Homo sapiens
cctagaaagggcagccgg

SEQ ID NO: 6004 - DNA, 18 bp, Homo sapiens
tcccagaaggggaagggg

SEQ ID NO: 6005 - DNA, 23 bp, Homo sapiens
tctcagaaaagggtggagctcag

SEQ ID NO: 6006 - DNA, 22 bp, Homo sapiens
tcctagagaaggcagggaatgg

SEQ ID NO: 6007 - DNA, 99 bp, Amsacta moorei entomopoxvirus
ggaaagcggaaaaacggaggatggaagggcagaagatggggagtcccgatcctcctcctgcatcccctcgccttccattctccggccctccgcgagtcc

SEQ ID NO: 6008 - DNA, 24 bp, Amsacta moorei entomopoxvirus
aagcggaaaaacggaggatggaag

SEQ ID NO: 6009 - DNA, 24 bp, Amsacta moorei entomopoxvirus
tcccctcgccttccattctccggc

SEQ ID NO: 6010 - DNA, 14 bp, Homo sapiens
agggagaaagatgg

SEQ ID NO: 6011 - DNA, 21 bp, Homo sapiens
agcgaaggcacttgggggtgg

SEQ ID NO: 6012 - DNA, 17 bp, Homo sapiens
aagcgggaagaggacag

SEQ ID NO: 6013 - DNA, 18 bp, Homo sapiens
agaggaggaagaggatgg

SEQ ID NO: 6014 - DNA, 16 bp, Homo sapiens
aagggggaagatggaa

SEQ ID NO: 6015 - DNA, 18 bp, Homo sapiens
agcggacggaatgaatgg

SEQ ID NO: 6016 - DNA, 14 bp, Homo sapiens
agcagggaggacgg

SEQ ID NO: 6017 - DNA, 19 bp, Homo sapiens
agcggaaaagaggaaatgg

SEQ ID NO: 6018 - DNA, 21 bp, Homo sapiens
agaggaagaatggaggattgg

SEQ ID NO: 6019 - DNA, 19 bp, Homo sapiens
agaggaaggacggggaaag

SEQ ID NO: 6020 - DNA, 20 bp, Homo sapiens
aagggaagaaaacatggagg

SEQ ID NO: 6021 - DNA, 18 bp, Homo sapiens
aggggaaagacggagggg

SEQ ID NO: 6022 - DNA, 14 bp, Homo sapiens
aagggaaaggatgg

SEQ ID NO: 6023 - DNA, 20 bp, Homo sapiens
aagcgagaaaacgcaggagg

SEQ ID NO: 6024 - DNA, 15 bp, Homo sapiens
acggaggagtgagga

SEQ ID NO: 6025 - DNA, 18 bp, Homo sapiens
agtggaaagatgaatgga

SEQ ID NO: 6026 - DNA, 16 bp, Homo sapiens
gcggtggaaagatgga

SEQ ID NO: 6027 - DNA, 20 bp, Homo sapiens
ggagaaggaaatgatggaag

SEQ ID NO: 6028 - DNA, 18 bp, Homo sapiens
gcaggacggagggggtgg

SEQ ID NO: 6029 - DNA, 20 bp, Homo sapiens
aagcggaaagtgtggtgggg

SEQ ID NO: 6030 - DNA, 17 bp, Homo sapiens
agggagaaaggatggaa

SEQ ID NO: 6031 - DNA, 16 bp, Homo sapiens
gcagaaaaaaatggaa

SEQ ID NO: 6032 - DNA, 20 bp, Homo sapiens
agcagaagaattaggggtgg

SEQ ID NO: 6033 - DNA, 22 bp, Homo sapiens
gctgagggacggaggacactgg

SEQ ID NO: 6034 - DNA, 18 bp, Homo sapiens
aagaggggagagatggaa

SEQ ID NO: 6035 - DNA, 17 bp, Homo sapiens
ggaacaaggggtggaag

SEQ ID NO: 6036 - DNA, 23 bp, Homo sapiens
aagcgaaaaaaatgaggtggaag

SEQ ID NO: 6037 - DNA, 20 bp, Homo sapiens
aagcggtgagatggagatgg

SEQ ID NO: 6038 - DNA, 17 bp, Homo sapiens
gctggaaaatgaggagg

SEQ ID NO: 6039 - DNA, 17 bp, Homo sapiens
aggggaggggaggatgg

SEQ ID NO: 6040 - DNA, 17 bp, Homo sapiens
ggaaagatggatggaag

SEQ ID NO: 6041 - DNA, 15 bp, Homo sapiens
ggaaggatgaatgga

SEQ ID NO: 6042 - DNA, 18 bp, Homo sapiens
gctgggcaggaggatgga

SEQ ID NO: 6043 - DNA, 18 bp, Homo sapiens
aagcggaaagtggggtgg

SEQ ID NO: 6044 - DNA, 19 bp, Homo sapiens
agggagggagaacatggga

SEQ ID NO: 6045 - DNA, 17 bp, Homo sapiens
aggggagggagatggaa

SEQ ID NO: 6046 - DNA, 18 bp, Homo sapiens
agcggaaaggggagttgg

SEQ ID NO: 6047 - DNA, 18 bp, Homo sapiens
gcagaaaaaaaaaagtgg

SEQ ID NO: 6048 - DNA, 17 bp, Homo sapiens
aggtgaaggatgatgga

SEQ ID NO: 6049 - DNA, 14 bp, Homo sapiens
aagcagggaagatg

SEQ ID NO: 6050 - DNA, 17 bp, Homo sapiens
ggacagagggatggaag

SEQ ID NO: 6051 - DNA, 21 bp, Homo sapiens
aagaggaaaatgcagggtgga

SEQ ID NO: 6052 - DNA, 23 bp, Homo sapiens
aagcgggtgagagaacatggaag

SEQ ID NO: 6053 - DNA, 17 bp, Homo sapiens
agtgggggaaaatggaa

SEQ ID NO: 6054 - DNA, 21 bp, Homo sapiens
aggggaagaatggaaggatgg

SEQ ID NO: 6055 - DNA, 17 bp, Homo sapiens
ggaggggaagaatggaa

SEQ ID NO: 6056 - DNA, 18 bp, Homo sapiens
ggaaaaaaaaatggtgga

SEQ ID NO: 6057 - DNA, 18 bp, Homo sapiens
aagggaaaagcaatggaa

SEQ ID NO: 6058 - DNA, 20 bp, Homo sapiens
agcggaagggcgggcaccga

SEQ ID NO: 6059 - DNA, 17 bp, Homo sapiens
aagaggaaaaaagatgg

SEQ ID NO: 6060 - DNA, 21 bp, Homo sapiens
aagtgggaaaacggcagacag

SEQ ID NO: 6061 - DNA, 24 bp, Homo sapiens
aagcggaagaagccgctggatgga

SEQ ID NO: 6062 - DNA, 20 bp, Homo sapiens
aagctggaggatggggatgg

SEQ ID NO: 6063 - DNA, 15 bp, Homo sapiens
aagccgagaaggtgg

SEQ ID NO: 6064 - DNA, 22 bp, Homo sapiens
aagtgggtaagacggaagtgga

SEQ ID NO: 6065 - DNA, 19 bp, Homo sapiens
agcggggacacggaggatg

SEQ ID NO: 6066 - DNA, 19 bp, Homo sapiens
aagcgaaagagcggggcgg

SEQ ID NO: 6067 - DNA, 19 bp, Homo sapiens
aaggggaaagtggagccgg

SEQ ID NO: 6068 - DNA, 19 bp, Homo sapiens
agtggaagagtggagaaca

SEQ ID NO: 6069 - DNA, 15 bp, Homo sapiens
aagggggaggacgga

SEQ ID NO: 6070 - DNA, 21 bp, Homo sapiens
agtggaaagacagggggaggg

SEQ ID NO: 6071 - DNA, 21 bp, Homo sapiens
aagtggagaaacaggagacag

SEQ ID NO: 6072 - DNA, 21 bp, Homo sapiens
ggaagtgggagaggatggaag

SEQ ID NO: 6073 - DNA, 14 bp, Homo sapiens
gcgaggaggacgga

SEQ ID NO: 6074 - DNA, 14 bp, Homo sapiens
ggaggggatggaag

SEQ ID NO: 6075 - DNA, 18 bp, Homo sapiens
aagtggaaaaactggagg

SEQ ID NO: 6076 - DNA, 16 bp, Homo sapiens
aagtggaaggagtgga

SEQ ID NO: 6077 - DNA, 19 bp, Homo sapiens
tctccacgccttccggggg

SEQ ID NO: 6078 - DNA, 17 bp, Homo sapiens
ctcgcgcctcgctctgg

SEQ ID NO: 6079 - DNA, 16 bp, Homo sapiens
tccccgcgtcttcccg

SEQ ID NO: 6080 - DNA, 23 bp, Homo sapiens
cccttcgccttcctcaacgtggc

SEQ ID NO: 6081 - DNA, 22 bp, Homo sapiens
tcccctcgccttgtggggaggc

SEQ ID NO: 6082 - DNA, 17 bp, Homo sapiens
cctctttcttcctccgg

SEQ ID NO: 6083 - DNA, 20 bp, Homo sapiens
cctctctccggctctctggc

SEQ ID NO: 6084 - DNA, 18 bp, Homo sapiens
tccccttgcctgtctagg

SEQ ID NO: 6085 - DNA, 19 bp, Homo sapiens
ctcgcctcttgcctcttgg

SEQ ID NO: 6086 - DNA, 24 bp, Homo sapiens
cctttccttccatatttcttccgg

SEQ ID NO: 6087 - DNA, 18 bp, Homo sapiens
tcctctccccttccacgg

SEQ ID NO: 6088 - DNA, 23 bp, Homo sapiens
cccctttgccttttgctctctgg

SEQ ID NO: 6089 - DNA, 18 bp, Homo sapiens
tcccttccctttccattc

SEQ ID NO: 6090 - DNA, 19 bp, Homo sapiens
tctcctcgcctcctaatgg

SEQ ID NO: 6091 - DNA, 22 bp, Homo sapiens
tcccctcggctgcgactctggc

SEQ ID NO: 6092 - DNA, 19 bp, Homo sapiens
tccccttgtgcttctgtgg

SEQ ID NO: 6093 - DNA, 21 bp, Homo sapiens
tccccctgcctttgcgcccgg

SEQ ID NO: 6094 - DNA, 17 bp, Homo sapiens
cctctcgcctttcgagg

SEQ ID NO: 6095 - DNA, 63 bp, Amsacta moorei entomopoxvirus
gggccgcgggccagcagacgggccgcggcgccagcggcccacgcctcccgccgcattaggccc

SEQ ID NO: 6096 - DNA, 24 bp, Amsacta moorei entomopoxvirus
cccacgcctcccgccgcattaggc

SEQ ID NO: 6097 - DNA, 24 bp, Amsacta moorei entomopoxvirus
ggccagcagacgggccgcggcgcc

SEQ ID NO: 6098 - DNA, 23 bp, Homo sapiens
cccgcgcccccgccgacccctgg

SEQ ID NO: 6099 - DNA, 18 bp, Homo sapiens
cccacgcctcccctgcgc

SEQ ID NO: 6100 - DNA, 19 bp, Homo sapiens
cccatgcctcccacctcgg

SEQ ID NO: 6101 - DNA, 17 bp, Homo sapiens
ccatactctgcattagg

SEQ ID NO: 6102 - DNA, 20 bp, Homo sapiens
cccgggcctcccgcaccagg

SEQ ID NO: 6103 - DNA, 19 bp, Homo sapiens
catgcctcccgcgcctcgc

SEQ ID NO: 6104 - DNA, 18 bp, Homo sapiens
cccgcgcctccccgcagg

SEQ ID NO: 6105 - DNA, 22 bp, Homo sapiens
cccacgccttcctccttccggc

SEQ ID NO: 6106 - DNA, 19 bp, Homo sapiens
ccctgcctcccgtcctggc

SEQ ID NO: 6107 - DNA, 18 bp, Homo sapiens
cccgccgcctcttgccgc

SEQ ID NO: 6108 - DNA, 17 bp, Homo sapiens
cccgcctctcgccctgg

SEQ ID NO: 6109 - DNA, 17 bp, Homo sapiens
cgccctcccgcccgcgg

SEQ ID NO: 6110 - DNA, 18 bp, Homo sapiens
cccgcgcccccgccccgg

SEQ ID NO: 6111 - DNA, 22 bp, Homo sapiens
cccgcgccacccgccctccggc

SEQ ID NO: 6112 - DNA, 18 bp, Homo sapiens
cccacgccgtccgcgagg

SEQ ID NO: 6113 - DNA, 19 bp, Homo sapiens
cgcccctcctgctgcctgc

SEQ ID NO: 6114 - DNA, 21 bp, Homo sapiens
cgcctcccgctcaacccgggc

SEQ ID NO: 6115 - DNA, 19 bp, Homo sapiens
cccgcccctcccgccgggg

SEQ ID NO: 6116 - DNA, 23 bp, Homo sapiens
cccgcgccgcccgccgccaccgc

SEQ ID NO: 6117 - DNA, 18 bp, Homo sapiens
ccgctcctcccgccgcgg

SEQ ID NO: 6118 - DNA, 18 bp, Homo sapiens
cccgtgcctccgcccggc

SEQ ID NO: 6119 - DNA, 16 bp, Homo sapiens
cccaccctcccgctag

SEQ ID NO: 6120 - DNA, 21 bp, Homo sapiens
ccacgccttccgcggaggggc

SEQ ID NO: 6121 - DNA, 19 bp, Homo sapiens
cccgcgccccccgccccgg

SEQ ID NO: 6122 - DNA, 19 bp, Homo sapiens
cgcctcccgcgggttaggc

SEQ ID NO: 6123 - DNA, 18 bp, Homo sapiens
gccaggcactgcattagg

SEQ ID NO: 6124 - DNA, 22 bp, Homo sapiens
cccgccctcctgcagcgcaggc

SEQ ID NO: 6125 - DNA, 21 bp, Homo sapiens
ggctcgcggctccgcggcgcc

SEQ ID NO: 6126 - DNA, 19 bp, Homo sapiens
ggccagcagagggtcacag

SEQ ID NO: 6127 - DNA, 21 bp, Homo sapiens
ggtggcaagggctgcggcgcc

SEQ ID NO: 6128 - DNA, 16 bp, Homo sapiens
gcccgggccgcggcgc

SEQ ID NO: 6129 - DNA, 17 bp, Homo sapiens
ggcggcgggcgcggcgc

SEQ ID NO: 6130 - DNA, 18 bp, Homo sapiens
ggcggcagagcgcggcgc

SEQ ID NO: 6131 - DNA, 21 bp, Homo sapiens
ggcggcttcagctgcggcgcc

SEQ ID NO: 6132 - DNA, 23 bp, Homo sapiens
ggcctggcgggagctgcggcgcc

SEQ ID NO: 6133 - DNA, 16 bp, Homo sapiens
gggcagacggggctgc

SEQ ID NO: 6134 - DNA, 21 bp, Homo sapiens
agctggcgggcgggccggggc

SEQ ID NO: 6135 - DNA, 18 bp, Homo sapiens
ggccggcgggcgcagcgc

SEQ ID NO: 6136 - DNA, 18 bp, Homo sapiens
acccgccgggccgcggcg

SEQ ID NO: 6137 - DNA, 16 bp, Homo sapiens
ggcgggggccgcggcg

SEQ ID NO: 6138 - DNA, 19 bp, Homo sapiens
ggcggtggctgcgcggcgc

SEQ ID NO: 6139 - DNA, 20 bp, Homo sapiens
ggccagcagcgggccgtccg

SEQ ID NO: 6140 - DNA, 24 bp, Homo sapiens
ggccgggggcaggagcgcggcgcc

SEQ ID NO: 6141 - DNA, 20 bp, Homo sapiens
gactagcgggcggcggcgcc

SEQ ID NO: 6142 - DNA, 18 bp, Homo sapiens
gccagcggtgcgcggcgc

SEQ ID NO: 6143 - DNA, 21 bp, Homo sapiens
ggccggcaggtgggcagcgcc

SEQ ID NO: 6144 - DNA, 21 bp, Homo sapiens
ggcgcgggcggccgcggcgcc

SEQ ID NO: 6145 - DNA, 20 bp, Homo sapiens
ggccgcgggcggcagggtgc

SEQ ID NO: 6146 - DNA, 22 bp, Homo sapiens
ggccgcgggcgggtccactggc

SEQ ID NO: 6147 - DNA, 18 bp, Homo sapiens
ggccccgggtcgcggcgc

SEQ ID NO: 6148 - DNA, 21 bp, Homo sapiens
gccagcagatgggctggggcc

SEQ ID NO: 6149 - DNA, 18 bp, Homo sapiens
ggccggcggcggcggcgc

SEQ ID NO: 6150 - DNA, 21 bp, Homo sapiens
ggccagcaggctggctctggc

SEQ ID NO: 6151 - DNA, 15 bp, Homo sapiens
ggccgcgggcgggcg

SEQ ID NO: 6152 - DNA, 24 bp, Homo sapiens
ggctggcggttgggcagcggcgcc

SEQ ID NO: 6153 - DNA, 16 bp, Homo sapiens
ggccggcgcggcggcg

SEQ ID NO: 6154 - DNA, 24 bp, Homo sapiens
ggccaatgggtgggttgacaggcc

SEQ ID NO: 6155 - DNA, 24 bp, Homo sapiens
ggccgcgcgggcgggctgcgcgcc

SEQ ID NO: 6156 - DNA, 19 bp, Homo sapiens
ggccacggcggcgtggcgc

SEQ ID NO: 6157 - DNA, 22 bp, Homo sapiens
ggcccgcagaacccgcggcgcc

SEQ ID NO: 6158 - DNA, 16 bp, Homo sapiens
ggccagcagggggcgc

SEQ ID NO: 6159 - DNA, 19 bp, Homo sapiens
agccagcaggtgggggtgc

SEQ ID NO: 6160 - DNA, 22 bp, Homo sapiens
ggtcagcgcggtagcgcggcgc

SEQ ID NO: 6161 - DNA, 22 bp, Homo sapiens
ggttggcagacagatgggtgcc

SEQ ID NO: 6162 - DNA, 19 bp, Homo sapiens
ggccagcagaacgggtggc

SEQ ID NO: 6163 - DNA, 23 bp, Homo sapiens
ggccgggccggggtcgcggcgcc

SEQ ID NO: 6164 - DNA, 16 bp, Homo sapiens
ggccagcgggcgggcc

SEQ ID NO: 6165 - DNA, 20 bp, Homo sapiens
gcctagtcgcagccgcggcg

SEQ ID NO: 6166 - DNA, 22 bp, Homo sapiens
ggctggagacggacagggtgcc

SEQ ID NO: 6167 - DNA, 19 bp, Homo sapiens
ggtcaggagggcgcggcgc

SEQ ID NO: 6168 - DNA, 21 bp, Homo sapiens
ggccggctggcgggcggcgcc

SEQ ID NO: 6169 - DNA, 65 bp, Amsacta moorei entomopoxvirus
gaaaatttgtgagtatatcagatcatattataaagatgatataagttactttgaaacaggatttc

SEQ ID NO: 6170 - DNA, 24 bp, Amsacta moorei entomopoxvirus
tgagtatatcagatcatattataa

SEQ ID NO: 6171 - DNA, 24 bp, Amsacta moorei entomopoxvirus
taagttactttgaaacaggatttc

SEQ ID NO: 6172 - DNA, 22 bp, Homo sapiens
tgagtatattggattagtcaca

SEQ ID NO: 6173 - DNA, 22 bp, Homo sapiens
gagtgtgcatgtcatattataa

SEQ ID NO: 6174 - DNA, 18 bp, Homo sapiens
gttaagccaacaggattt

SEQ ID NO: 6175 - DNA, 23 bp, Homo sapiens
tgattatttggctaacaggattt

SEQ ID NO: 6176 - DNA, 76 bp, Amsacta moorei entomopoxvirus
gcaatgttaaagtgactcctccagattactcacctataatagcgagtattaaaggtaagagttatgacgcattagc

SEQ ID NO: 6177 - DNA, 24 bp, Amsacta moorei entomopoxvirus
ttaaaggtaagagttatgacgcat

SEQ ID NO: 6178 - DNA, 24 bp, Amsacta moorei entomopoxvirus
aaagtgactcctccagattactca

SEQ ID NO: 6179 - DNA, 22 bp, Homo sapiens
tcaaaggtgagagttcaagcat

SEQ ID NO: 6180 - DNA, 18 bp, Homo sapiens
taaaggtaaggaacaatg

SEQ ID NO: 6181 - DNA, 22 bp, Homo sapiens
aaactgatttaaacagattact

SEQ ID NO: 6182 - DNA, 18 bp, Homo sapiens
gtgactccccacctccct

SEQ ID NO: 6183 - DNA, 19 bp, Homo sapiens
aaatgattcctccaagatt

SEQ ID NO: 6184 - DNA, 19 bp, Homo sapiens
aaagtggccctccagaacc

SEQ ID NO: 6185 - DNA, 19 bp, Homo sapiens
aagtattcctccaatatca

SEQ ID NO: 6186 - DNA, 16 bp, Homo sapiens
aaagtgactctttact

SEQ ID NO: 6187 - DNA, 18 bp, Homo sapiens
gtgactccccctctctca

SEQ ID NO: 6188 - DNA, 22 bp, Homo sapiens
aaatggttttaaagattactca

SEQ ID NO: 6189 - DNA, 21 bp, Homo sapiens
aagtgactctctcgtgacctc

SEQ ID NO: 6190 - DNA, 21 bp, Homo sapiens
agggattcctccaaagcctca

SEQ ID NO: 6191 - DNA, 23 bp, Homo sapiens
aagtgacttccctgctaaagctc

SEQ ID NO: 6192 - DNA, 18 bp, Homo sapiens
aaagtgcccagattgctc

SEQ ID NO: 6193 - DNA, 23 bp, Homo sapiens
aaagtgacttctcaatgtaaact

SEQ ID NO: 6194 - DNA, 77 bp, Amsacta moorei entomopoxvirus
tatcaagatgtgtatatttgcgaaaattgtggagacatagcagcacaaatcaaaagtattaatacatgtcttagatg

SEQ ID NO: 6195 - DNA, 24 bp, Amsacta moorei entomopoxvirus
cagcacaaatcaaaagtattaata

SEQ ID NO: 6196 - DNA, 24 bp, Amsacta moorei entomopoxvirus
tgtatatttgcgaaaattgtggag

SEQ ID NO: 6197 - DNA, 18 bp, Homo sapiens
acacaaatcaaaatacca

SEQ ID NO: 6198 - DNA, 18 bp, Homo sapiens
agcacaaaccaaagacac

SEQ ID NO: 6199 - DNA, 19 bp, Homo sapiens
cagcacaatcaaatcagta

SEQ ID NO: 6200 - DNA, 23 bp, Homo sapiens
agcacattttaagaagtattaat

SEQ ID NO: 6201 - DNA, 19 bp, Homo sapiens
cagcacaaactagaaaata

SEQ ID NO: 6202 - DNA, 18 bp, Homo sapiens
cagtgcaattcaaaagca

SEQ ID NO: 6203 - DNA, 22 bp, Homo sapiens
cagcacaaatcaaagcccaata

SEQ ID NO: 6204 - DNA, 17 bp, Homo sapiens
cagtaaaatcaaaagca

SEQ ID NO: 6205 - DNA, 21 bp, Homo sapiens
tgtaggttccggaaattgtgg

SEQ ID NO: 6206 - DNA, 22 bp, Homo sapiens
tgtgtatttacggaaaataagg

SEQ ID NO: 6207 - DNA, 62 bp, Southern bean mosaic virus
gccgaggacttacttgacgaatctcctgtggacttggttcgcaggggtttgtgtgacccggt

SEQ ID NO: 6208 - DNA, 24 bp, Southern bean mosaic virus
acgaatctcctgtggacttggttc

SEQ ID NO: 6209 - DNA, 22 bp, Southern bean mosaic virus
gcaggggtttgtgtgacccggt

SEQ ID NO: 6210 - DNA, 20 bp, Homo sapiens
gaattcttgtgggacagttc

SEQ ID NO: 6211 - DNA, 24 bp, Homo sapiens
cgggtctcctatgggtctgggttc

SEQ ID NO: 6212 - DNA, 15 bp, Homo sapiens
gaatcttgcttggtt

SEQ ID NO: 6213 - DNA, 18 bp, Homo sapiens
atctcctgggttcagttc

SEQ ID NO: 6214 - DNA, 16 bp, Homo sapiens
gagctccttcttggtt

SEQ ID NO: 6215 - DNA, 17 bp, Homo sapiens
cttttatagcttggttc

SEQ ID NO: 6216 - DNA, 19 bp, Homo sapiens
cgagtctcctggggacgtg

SEQ ID NO: 6217 - DNA, 20 bp, Homo sapiens
gaatgtcctgtgggtagggt

SEQ ID NO: 6218 - DNA, 20 bp, Homo sapiens
gcaggggtttggggagaggt

SEQ ID NO: 6219 - DNA, 16 bp, Homo sapiens
gcaggggttggtgggg

SEQ ID NO: 6220 - DNA, 19 bp, Homo sapiens
aggggacttgtggtttggt

SEQ ID NO: 6221 - DNA, 16 bp, Homo sapiens
gcaggggtgtgattgg

SEQ ID NO: 6222 - DNA, 20 bp, Homo sapiens
gcaggggttcggctcccggt

SEQ ID NO: 6223 - DNA, 23 bp, Homo sapiens
gcggggattgaggttggtctggt

SEQ ID NO: 6224 - DNA, 21 bp, Homo sapiens
gcagggatttctacttttggt

SEQ ID NO: 6225 - DNA, 22 bp, Homo sapiens
gcatgcctttgtgtgacccggt

SEQ ID NO: 6226 - DNA, 96 bp, Southern bean mosaic virus
gggctgatgtagagatgagaattgttctggggggctttggccataaactggctaaagccgcccagaataggttttcgtgtttcatgaactcagtct

SEQ ID NO: 6227 - DNA, 24 bp, Southern bean mosaic virus
aagccgcccagaataggttttcgt

SEQ ID NO: 6228 - DNA, 24 bp, Southern bean mosaic virus
tgatgtagagatgagaattgttct

SEQ ID NO: 6229 - DNA, 22 bp, Homo sapiens
agccacccagagtcctgctcgt

SEQ ID NO: 6230 - DNA, 19 bp, Homo sapiens
aagcttccagaagtattcg

SEQ ID NO: 6231 - DNA, 15 bp, Homo sapiens
gcccccggagatttt

SEQ ID NO: 6232 - DNA, 25 bp, Homo sapiens
aaaccagaacagggtaggtttttgt

SEQ ID NO: 6233 - DNA, 22 bp, Homo sapiens
tgtgtagagatgggatccccct

SEQ ID NO: 6234 - DNA, 65 bp, Southern bean mosaic virus
gtctggaccgcacagtgtgtgtggcaaaggcatcggcgttgcgacgcgcgctttgttcagcaggc

SEQ ID NO: 6235 - DNA, 24 bp, Southern bean mosaic virus
ccgcacagtgtgtgtggcaaaggc

SEQ ID NO: 6236 - DNA, 24 bp, Southern bean mosaic virus
cgacgcgcgctttgttcagcaggc

SEQ ID NO: 6237 - DNA, 20 bp, Homo sapiens
gtatggtatgtactcaaggc

SEQ ID NO: 6238 - DNA, 19 bp, Homo sapiens
gcacagtaggtgcagaggc

SEQ ID NO: 6239 - DNA, 29 bp, Homo sapiens
ccccatagtgtgtgtgtttgtgcctttgc

SEQ ID NO: 6240 - DNA, 18 bp, Homo sapiens
gtgtgtgtggacagaagg

SEQ ID NO: 6241 - DNA, 21 bp, Homo sapiens
ccttatagtgtgtgtgggggg

SEQ ID NO: 6242 - DNA, 21 bp, Homo sapiens
gcgtcagagtgtggcagaggc

SEQ ID NO: 6243 - DNA, 21 bp, Homo sapiens
ccgtggtgcaaaggcagaggc

SEQ ID NO: 6244 - DNA, 22 bp, Homo sapiens
ccgtgcatgtgtgtgtcaaggc

SEQ ID NO: 6245 - DNA, 18 bp, Homo sapiens
gtgtgtgtgtccaggggc

SEQ ID NO: 6246 - DNA, 24 bp, Homo sapiens
ccgtgtgtgtgtgtgtgtccaggc

SEQ ID NO: 6247 - DNA, 23 bp, Homo sapiens
gcaaggtgtgtgtgtgtgccttg

SEQ ID NO: 6248 - DNA, 16 bp, Homo sapiens
ccacacgtggcaaggg

SEQ ID NO: 6249 - DNA, 20 bp, Homo sapiens
cacagtgtgagatgagaggc

SEQ ID NO: 6250 - DNA, 23 bp, Homo sapiens
ccgcacagtggatccctggaggc

SEQ ID NO: 6251 - DNA, 20 bp, Homo sapiens
gcgtgtgtgtgtgtgccttg

SEQ ID NO: 6252 - DNA, 20 bp, Homo sapiens
gctggtgcgtgggcggaggc

SEQ ID NO: 6253 - DNA, 22 bp, Homo sapiens
gcatggtgtgcctatctgaagg

SEQ ID NO: 6254 - DNA, 25 bp, Homo sapiens
ccgtgtgtgtgcagggagcggaggc

SEQ ID NO: 6255 - DNA, 18 bp, Homo sapiens
gtataatgtggcaaaggc

SEQ ID NO: 6256 - DNA, 20 bp, Homo sapiens
cagtgtgtgtgtgtgccttg

SEQ ID NO: 6257 - DNA, 19 bp, Homo sapiens
gtatgtgtgtgcagggagg

SEQ ID NO: 6258 - DNA, 18 bp, Homo sapiens
gcacagttttcataaagg

SEQ ID NO: 6259 - DNA, 16 bp, Homo sapiens
gcagtgtgtgccaagg

SEQ ID NO: 6260 - DNA, 25 bp, Homo sapiens
cggcgcgcgctaggccgcggtgggc

SEQ ID NO: 6261 - DNA, 21 bp, Homo sapiens
cgacgcgccgccgcagctggc

SEQ ID NO: 6262 - DNA, 17 bp, Homo sapiens
gcgcgctttggcggggc

SEQ ID NO: 6263 - DNA, 19 bp, Homo sapiens
gcgcgcctggcgcagcggg

SEQ ID NO: 6264 - DNA, 16 bp, Homo sapiens
cggcgcgcaccagcag

SEQ ID NO: 6265 - DNA, 17 bp, Homo sapiens
gaccgtgggtcagcagg

SEQ ID NO: 6266 - DNA, 66 bp, Southern bean mosaic virus
gtgtctatgccacgttgctcgcacatgcgtatcacagtacgcgtagccataaccttacactcacgc

SEQ ID NO: 6267 - DNA, 24 bp, Southern bean mosaic virus
tatgccacgttgctcgcacatgcg

SEQ ID NO: 6268 - DNA, 24 bp, Southern bean mosaic virus
cgcgtagccataaccttacactca

SEQ ID NO: 6269 - DNA, 17 bp, Homo sapiens
acgtgcacacacgtgca

SEQ ID NO: 6270 - DNA, 20 bp, Homo sapiens
gcatggccagtctacactca

SEQ ID NO: 6271 - DNA, 73 bp, Southern bean mosaic virus
cggctgtttgttaagcaggagccccacgcctcccgaaaggtgagagagggccgcttccgcttgatatcatctg

SEQ ID NO: 6272 - DNA, 24 bp, Southern bean mosaic virus
aagcaggagccccacgcctcccga

SEQ ID NO: 6273 - DNA, 24 bp, Southern bean mosaic virus
tgagagagggccgcttccgcttga

SEQ ID NO: 6274 - DNA, 14 bp, Homo sapiens
aggagacacctccg

SEQ ID NO: 6275 - DNA, 23 bp, Homo sapiens
agcagaagtttctccctcttcct

SEQ ID NO: 6276 - DNA, 19 bp, Homo sapiens
ggacaggagctttgctctc

SEQ ID NO: 6277 - DNA, 17 bp, Homo sapiens
agcaggagcctcactct

SEQ ID NO: 6278 - DNA, 21 bp, Homo sapiens
aaacaggagctccggccagcc

SEQ ID NO: 6279 - DNA, 20 bp, Homo sapiens
gcagggcccgggcctcccga

SEQ ID NO: 6280 - DNA, 20 bp, Homo sapiens
agcagggccccgcgcctccc

SEQ ID NO: 6281 - DNA, 19 bp, Homo sapiens
agccaggaactgcctcccg

SEQ ID NO: 6282 - DNA, 19 bp, Homo sapiens
gcagcagccccccgacccg

SEQ ID NO: 6283 - DNA, 17 bp, Homo sapiens
gaaggacccgcctcccg

SEQ ID NO: 6284 - DNA, 18 bp, Homo sapiens
agcagagccggcctcccg

SEQ ID NO: 6285 - DNA, 18 bp, Homo sapiens
agtagaagccctgggcct

SEQ ID NO: 6286 - DNA, 18 bp, Homo sapiens
agcaagggccccacggcc

SEQ ID NO: 6287 - DNA, 17 bp, Homo sapiens
aagtgggagcctcccaa

SEQ ID NO: 6288 - DNA, 20 bp, Homo sapiens
aagcaggagttcccccttac

SEQ ID NO: 6289 - DNA, 17 bp, Homo sapiens
gcaggagctcctcctcc

SEQ ID NO: 6290 - DNA, 20 bp, Homo sapiens
gcaggagccacagcgcccga

SEQ ID NO: 6291 - DNA, 17 bp, Homo sapiens
gccgggcccgcctcccg

SEQ ID NO: 6292 - DNA, 16 bp, Homo sapiens
gcaggagccaaacctc

SEQ ID NO: 6293 - DNA, 19 bp, Homo sapiens
aagcagcagccctagctct

SEQ ID NO: 6294 - DNA, 18 bp, Homo sapiens
aaggaggagttcccgtct

SEQ ID NO: 6295 - DNA, 17 bp, Homo sapiens
agcaggaagcctgctct

SEQ ID NO: 6296 - DNA, 20 bp, Homo sapiens
gcaggagcccccaggtcccg

SEQ ID NO: 6297 - DNA, 16 bp, Homo sapiens
aagcaggagccacctc

SEQ ID NO: 6298 - DNA, 17 bp, Homo sapiens
gcagagcccccttctcc

SEQ ID NO: 6299 - DNA, 14 bp, Homo sapiens
agcagagccccctc

SEQ ID NO: 6300 - DNA, 19 bp, Homo sapiens
agggggagccccgcgctct

SEQ ID NO: 6301 - DNA, 22 bp, Homo sapiens
aaccgggggccccacggtctcc

SEQ ID NO: 6302 - DNA, 21 bp, Homo sapiens
gcggcggccccacggcagcct

SEQ ID NO: 6303 - DNA, 20 bp, Homo sapiens
gcagtgagcctcctagcccc

SEQ ID NO: 6304 - DNA, 15 bp, Homo sapiens
gcaggaggcctcccg

SEQ ID NO: 6305 - DNA, 23 bp, Homo sapiens
aagcaggagcccttggtggaccc

SEQ ID NO: 6306 - DNA, 20 bp, Homo sapiens
aagcaggagcctcactgtcc

SEQ ID NO: 6307 - DNA, 19 bp, Homo sapiens
tgagagaggccactgcttg

SEQ ID NO: 6308 - DNA, 21 bp, Homo sapiens
tgagagaagggctaggcttga

SEQ ID NO: 6309 - DNA, 18 bp, Homo sapiens
gagagaggggcccgtttg

SEQ ID NO: 6310 - DNA, 21 bp, Homo sapiens
tgaggagggtcgttcctttga

SEQ ID NO: 6311 - DNA, 20 bp, Homo sapiens
tgggagaggcattttgcttg

SEQ ID NO: 6312 - DNA, 71 bp, Southern bean mosaic virus
caaccatttccggtcgcttatacgaggtagagttctgctctcacgttataagggaagatcgatgttggttg

SEQ ID NO: 6313 - DNA, 23 bp, Southern bean mosaic virus
taagggaagatcgatgttggttg

SEQ ID NO: 6314 - DNA, 24 bp, Southern bean mosaic virus
tcgcttatacgaggtagagttctg

SEQ ID NO: 6315 - DNA, 21 bp, Homo sapiens
gggaagatcggtttcctgttg

SEQ ID NO: 6316 - DNA, 18 bp, Homo sapiens
taagggaagttctaggtt

SEQ ID NO: 6317 - DNA, 19 bp, Homo sapiens
aggggggatatgctggttg

SEQ ID NO: 6318 - DNA, 18 bp, Homo sapiens
gcttatactgggtgaaat

SEQ ID NO: 6319 - DNA, 17 bp, Homo sapiens
tctttatatgaggtaaa

SEQ ID NO: 6320 - DNA, 109 bp, Southern bean mosaic virus
tctccactctctcggtgttccagaggcatgtcctcaatgctggtatactcaatggcgttatcaaagccgtgggccagcgtgtcctgggacagttgcaagggtgtgatga

SEQ ID NO: 6321 - DNA, 24 bp, Southern bean mosaic virus
tcggtgttccagaggcatgtcctc

SEQ ID NO: 6322 - DNA, 24 bp, Southern bean mosaic virus
cagcgtgtcctgggacagttgcaa

SEQ ID NO: 6323 - DNA, 23 bp, Homo sapiens
tcagtgttctgagttcatgtcct

SEQ ID NO: 6324 - DNA, 17 bp, Homo sapiens
tcggtgtccaggagtct

SEQ ID NO: 6325 - DNA, 18 bp, Homo sapiens
gcgggtcctggggcgctg

SEQ ID NO: 6326 - DNA, 19 bp, Homo sapiens
gcttgtcctgggaggacag

SEQ ID NO: 6327 - DNA, 22 bp, Homo sapiens
cagcctgtcctgggaggctgca

SEQ ID NO: 6328 - DNA, 19 bp, Homo sapiens
cagcggtgtcctggagctg

SEQ ID NO: 6329 - DNA, 18 bp, Homo sapiens
cagcctgtcctgggggtc

SEQ ID NO: 6330 - DNA, 16 bp, Homo sapiens
acgcgtggacagttgc

SEQ ID NO: 6331 - DNA, 18 bp, Homo sapiens
gcgtgtcctgggggccgc

SEQ ID NO: 6332 - DNA, 17 bp, Homo sapiens
gtgtcctggttcttgca

SEQ ID NO: 6333 - DNA, 19 bp, Homo sapiens
cagcgtgtgtttggggcag

SEQ ID NO: 6334 - DNA, 18 bp, Homo sapiens
cagggtgtcctgggcagt

SEQ ID NO: 6335 - DNA, 67 bp, Southern bean mosaic virus
gtcaggacccctttggtccatgtcgcgcgggtcctccggttcaggcaggcgtctgaaggggcttgac

SEQ ID NO: 6336 - DNA, 24 bp, Southern bean mosaic virus
acccctttggtccatgtcgcgcgg

SEQ ID NO: 6337 - DNA, 24 bp, Southern bean mosaic virus
aggcaggcgtctgaaggggcttga

SEQ ID NO: 6338 - DNA, 14 bp, Homo sapiens
cccttggtccgcag

SEQ ID NO: 6339 - DNA, 18 bp, Homo sapiens
aggcggcgtctgaggcgg

SEQ ID NO: 6340 - DNA, 22 bp, Homo sapiens
agggagaagctgaaggggcttg

SEQ ID NO: 6341 - DNA, 18 bp, Homo sapiens
aggcaggtgttggacttg

SEQ ID NO: 6342 - DNA, 18 bp, Homo sapiens
aggcaggcgctgctttga

SEQ ID NO: 6343 - DNA, 17 bp, Homo sapiens
agcgggtcaggggcttg

SEQ ID NO: 6344 - DNA, 21 bp, Homo sapiens
ggcaggtgttctgagggcctg

SEQ ID NO: 6345 - DNA, 18 bp, Homo sapiens
aggcagcgtctggggttg

SEQ ID NO: 6346 - DNA, 21 bp, Homo sapiens
aggcaggagtttgggaggtgg

SEQ ID NO: 6347 - DNA, 18 bp, Homo sapiens
ggcaggcgtctgcagtgg

SEQ ID NO: 6348 - DNA, 16 bp, Homo sapiens
ggcgcgtctggagcgg

SEQ ID NO: 6349 - DNA, 17 bp, Homo sapiens
ggcgggcgcctgggctg

SEQ ID NO: 6350 - DNA, 18 bp, Homo sapiens
ggcagtgtctgaggccca

SEQ ID NO: 6351 - DNA, 23 bp, Homo sapiens
aggttgggcgtttggaccgttga

SEQ ID NO: 6352 - DNA, 19 bp, Homo sapiens
aggcaggcgtttggagagg

SEQ ID NO: 6353 - DNA, 19 bp, Homo sapiens
ggtgggcgtctaaagccgg

SEQ ID NO: 6354 - DNA, 20 bp, Homo sapiens
aggccagagggaggggcttg

SEQ ID NO: 6355 - DNA, 16 bp, Homo sapiens
aggggcggaggggctt

SEQ ID NO: 6356 - DNA, 17 bp, Homo sapiens
agccaggcgtctgggga

SEQ ID NO: 6357 - DNA, 19 bp, Homo sapiens
ggcaggcgtctgtggcttg

SEQ ID NO: 6358 - DNA, 20 bp, Homo sapiens
ggcagctgccagggggcttg

SEQ ID NO: 6359 - DNA, 21 bp, Homo sapiens
aggcaggcgctggctgcttga

SEQ ID NO: 6360 - DNA, 21 bp, Homo sapiens
agggggctggggaggggcttg

SEQ ID NO: 6361 - DNA, 19 bp, Homo sapiens
aggtgggggtttgaagagg

SEQ ID NO: 6362 - DNA, 20 bp, Homo sapiens
agggaggcgtctgggtcctg

SEQ ID NO: 6363 - DNA, 19 bp, Homo sapiens
ggcaggtggctgaggcctg

SEQ ID NO: 6364 - DNA, 20 bp, Homo sapiens
aggagggaatgaggggcttg

SEQ ID NO: 6365 - DNA, 21 bp, Homo sapiens
aggcaggcggctgggaggtgg

SEQ ID NO: 6366 - DNA, 125 bp, Paramecium bursaria Chlorella virus 1
ttcccggggaggagggcaccaggttcccggggaggagggcaccaggttcccggggaggagggcaccaggttcccggggaggagggcaccaggttcccggggaggagggcaccaggttcccgggga

SEQ ID NO: 6367 - DNA, 24 bp, Paramecium bursaria Chlorella virus 1
ttcccggggaggagggcaccaggt

SEQ ID NO: 6368 - DNA, 24 bp, Paramecium bursaria Chlorella virus 1
gggcaccaggttcccggggaggag

SEQ ID NO: 6369 - DNA, 14 bp, Homo sapiens
gggaaggagaaagg

SEQ ID NO: 6370 - DNA, 19 bp, Homo sapiens
ctccacggggggcaccagg

SEQ ID NO: 6371 - DNA, 16 bp, Homo sapiens
ggggaagagaggaggt

SEQ ID NO: 6372 - DNA, 21 bp, Homo sapiens
ttcccggggggaggaccaggt

SEQ ID NO: 6373 - DNA, 24 bp, Homo sapiens
gggtgccaggcttggagggaggag

SEQ ID NO: 6374 - DNA, 18 bp, Homo sapiens
gcgctgcccgcggggagg

SEQ ID NO: 6375 - DNA, 19 bp, Homo sapiens
gggcactgtgttcccaggg

SEQ ID NO: 6376 - DNA, 23 bp, Homo sapiens
gggaccaggggaagggggaggag

SEQ ID NO: 6377 - DNA, 18 bp, Homo sapiens
ggtgctaggttccaggag

SEQ ID NO: 6378 - DNA, 21 bp, Homo sapiens
gggactggctgtggggaggag

SEQ ID NO: 6379 - DNA, 20 bp, Homo sapiens
gggtcgggaagggggaggag

SEQ ID NO: 6380 - DNA, 20 bp, Homo sapiens
ggcgcccctgcccggggagg

SEQ ID NO: 6381 - DNA, 19 bp, Homo sapiens
gggtcctaggtagggggag

SEQ ID NO: 6382 - DNA, 21 bp, Homo sapiens
ggtgcaaggagaggggaggag

SEQ ID NO: 6383 - DNA, 22 bp, Homo sapiens
ggcgctggtagggccggggagg

SEQ ID NO: 6384 - DNA, 18 bp, Homo sapiens
ggctgctggtcggggagg

SEQ ID NO: 6385 - DNA, 21 bp, Homo sapiens
gggttgggcatgggggaggag

SEQ ID NO: 6386 - DNA, 19 bp, Homo sapiens
gggctcggggcggggagga

SEQ ID NO: 6387 - DNA, 21 bp, Homo sapiens
gggaccatggatggggaggag

SEQ ID NO: 6388 - DNA, 18 bp, Homo sapiens
gggtgccagttcccaggg

SEQ ID NO: 6389 - DNA, 18 bp, Homo sapiens
gggtacaggatgggagga

SEQ ID NO: 6390 - DNA, 20 bp, Homo sapiens
gggcatcaggttctgaaaag

SEQ ID NO: 6391 - DNA, 20 bp, Homo sapiens
ggttgtcaggttccttggag

SEQ ID NO: 6392 - DNA, 21 bp, Homo sapiens
gggtccactgaaacggggagg

SEQ ID NO: 6393 - DNA, 19 bp, Homo sapiens
gggtgcaggaaggggagga

SEQ ID NO: 6394 - DNA, 16 bp, Homo sapiens
gggcaccaggtggagg

SEQ ID NO: 6395 - DNA, 15 bp, Homo sapiens
gggcgcgcggggagg

SEQ ID NO: 6396 - DNA, 24 bp, Homo sapiens
gggcgccggctcggcggggaggag

SEQ ID NO: 6397 - DNA, 17 bp, Homo sapiens
gggcacactcggggagg

SEQ ID NO: 6398 - DNA, 19 bp, Homo sapiens
ggactctttctggggagga

SEQ ID NO: 6399 - DNA, 18 bp, Homo sapiens
gggccttgggagggagga

SEQ ID NO: 6400 - DNA, 22 bp, Homo sapiens
ggttaccaggggtggggaggag

SEQ ID NO: 6401 - DNA, 22 bp, Homo sapiens
gggtccgggttcccgccctggg

SEQ ID NO: 6402 - DNA, 18 bp, Homo sapiens
gggcgggcccggggagga

SEQ ID NO: 6403 - DNA, 18 bp, Homo sapiens
gggctccaggttctcgag

SEQ ID NO: 6404 - DNA, 18 bp, Homo sapiens
gggcggcagtggggagga

SEQ ID NO: 6405 - DNA, 19 bp, Homo sapiens
gggcccgggcccggggagg

SEQ ID NO: 6406 - DNA, 19 bp, Homo sapiens
gggcccggggagggggagg

SEQ ID NO: 6407 - DNA, 17 bp, Homo sapiens
gggcccagggagggagg

SEQ ID NO: 6408 - DNA, 19 bp, Homo sapiens
gggcccagggctgggagga

SEQ ID NO: 6409 - DNA, 19 bp, Homo sapiens
gggccctgggacagggagg

SEQ ID NO: 6410 - DNA, 16 bp, Homo sapiens
gggcgtggcggggagg

SEQ ID NO: 6411 - DNA, 19 bp, Homo sapiens
gggtgccaaggtttgggag

SEQ ID NO: 6412 - DNA, 22 bp, Homo sapiens
ggctgctggagttggggaggag

SEQ ID NO: 6413 - DNA, 21 bp, Homo sapiens
gggtgccgacttggggaggag

SEQ ID NO: 6414 - DNA, 23 bp, Homo sapiens
gggcggcggcgcggggggaggag

SEQ ID NO: 6415 - DNA, 16 bp, Homo sapiens
gggggtcgtggggagg

SEQ ID NO: 6416 - DNA, 21 bp, Homo sapiens
ggtgctggtgtttaaaaggag

SEQ ID NO: 6417 - DNA, 17 bp, Homo sapiens
gggtccagggagggagg

SEQ ID NO: 6418 - DNA, 23 bp, Homo sapiens
aggcattggtgaagggggaggag

SEQ ID NO: 6419 - DNA, 21 bp, Homo sapiens
ggcaccaggagcctggggggg

SEQ ID NO: 6420 - DNA, 19 bp, Homo sapiens
gggcaccaggcttctgaag

SEQ ID NO: 6421 - DNA, 21 bp, Homo sapiens
gggctgggtttcccgaaggag

SEQ ID NO: 6422 - DNA, 22 bp, Homo sapiens
gagcgccagctctggggaggag

SEQ ID NO: 6423 - DNA, 23 bp, Homo sapiens
gggctgctaggagaggggaggag

SEQ ID NO: 6424 - DNA, 21 bp, Homo sapiens
gggtgttggcggggggaggag

SEQ ID NO: 6425 - DNA, 17 bp, Homo sapiens
gggccaggttcccagag

SEQ ID NO: 6426 - DNA, 23 bp, Homo sapiens
gggcacgcgcacgcggggaggag

SEQ ID NO: 6427 - DNA, 102 bp, Paramecium bursaria Chlorella virus 1
cacctctccatagttgcaaatacgctacgaaatgcccaaggacattgactaaacgtgtttctaaaatgttggccgcgtgtgtagggttttcagagggaggtg

SEQ ID NO: 6428 - DNA, 24 bp, Paramecium bursaria Chlorella virus 1
taaaatgttggccgcgtgtgtagg

SEQ ID NO: 6429 - DNA, 24 bp, Paramecium bursaria Chlorella virus 1
tgcaaatacgctacgaaatgccca

SEQ ID NO: 6430 - DNA, 20 bp, Homo sapiens
tgttggccacgaaagacagg

SEQ ID NO: 6431 - DNA, 23 bp, Homo sapiens
taaaatgttggctggagtagagg

SEQ ID NO: 6432 - DNA, 20 bp, Homo sapiens
aaatcttggcaatgtgtagg

SEQ ID NO: 6433 - DNA, 20 bp, Homo sapiens
atataggctgtgtgtgtagg

SEQ ID NO: 6434 - DNA, 17 bp, Homo sapiens
atgttggccaaagtagg

SEQ ID NO: 6435 - DNA, 25 bp, Homo sapiens
tgcaaatacgcaacaaatatgttca

SEQ ID NO: 6436 - DNA, 17 bp, Homo sapiens
caaatacaaagatgccc

SEQ ID NO: 6437 - DNA, 24 bp, Homo sapiens
tacaggtgtgcgccacaatgccca

SEQ ID NO: 6438 - DNA, 19 bp, Homo sapiens
tgcaaataagttcttgccc

SEQ ID NO: 6439 - DNA, 20 bp, Homo sapiens
caaatattccaaaatgctca

SEQ ID NO: 6440 - DNA, 16 bp, Homo sapiens
tacaaatacaaatgcc

SEQ ID NO: 6441 - DNA, 84 bp, Paramecium bursaria Chlorella virus 1
tacccagccgggtttacgcagctgcgtatacccagctgtgtttacgcagcggggtttacgcagctgggtagacccagctgggta

SEQ ID NO: 6442 - DNA, 24 bp, Paramecium bursaria Chlorella virus 1
acgcagctgcgtatacccagctgt

SEQ ID NO: 6443 - DNA, 24 bp, Paramecium bursaria Chlorella virus 1
tacgcagctgggtagacccagctg

SEQ ID NO: 6444 - DNA, 17 bp, Homo sapiens
cggggctggcccagctg

SEQ ID NO: 6445 - DNA, 14 bp, Homo sapiens
gcactcgcccagct

SEQ ID NO: 6446 - DNA, 18 bp, Homo sapiens
gcgggctgcgtatgccca

SEQ ID NO: 6447 - DNA, 19 bp, Homo sapiens
cgcagttgtccccagctgt

SEQ ID NO: 6448 - DNA, 21 bp, Homo sapiens
acgcagacaatgtccagttgt

SEQ ID NO: 6449 - DNA, 15 bp, Homo sapiens
cagctgctccagctg

SEQ ID NO: 6450 - DNA, 23 bp, Homo sapiens
cgcggctgctccggcccagctgt

SEQ ID NO: 6451 - DNA, 21 bp, Homo sapiens
gcacctcggtgggcccagctg

SEQ ID NO: 6452 - DNA, 17 bp, Homo sapiens
gcctgtagtcccagctg

SEQ ID NO: 6453 - DNA, 20 bp, Homo sapiens
gccggggtgaggcccagctg

SEQ ID NO: 6454 - DNA, 14 bp, Homo sapiens
aactaggtccagct

SEQ ID NO: 6455 - DNA, 20 bp, Homo sapiens
gcctgggaggggcccagctg

SEQ ID NO: 6456 - DNA, 14 bp, Homo sapiens
gcagctgggcacag

SEQ ID NO: 6457 - DNA, 18 bp, Homo sapiens
cacgtggcaggcccagct

SEQ ID NO: 6458 - DNA, 17 bp, Homo sapiens
gcagctgggcctaaact

SEQ ID NO: 6459 - DNA, 116 bp, Paramecium bursaria Chlorella virus 1
gaaggagggttgaatacagttgggggtagtccgctggtattcccagctgaggttgccttatttggtaatgcttccggaaataccacctgagtaccccattggtttataccttgttt

SEQ ID NO: 6460 - DNA, 24 bp, Paramecium bursaria Chlorella virus 1
tggtattcccagctgaggttgcct

SEQ ID NO: 6461 - DNA, 24 bp, Paramecium bursaria Chlorella virus 1
atgcttccggaaataccacctgag

SEQ ID NO: 6462 - DNA, 20 bp, Homo sapiens
gtatttttggctgggtgggc

SEQ ID NO: 6463 - DNA, 19 bp, Homo sapiens
tgggttcccagctccagcc

SEQ ID NO: 6464 - DNA, 19 bp, Homo sapiens
tggtttttctggctgagat

SEQ ID NO: 6465 - DNA, 21 bp, Homo sapiens
tgggttcctttttggttgcct

SEQ ID NO: 6466 - DNA, 20 bp, Homo sapiens
tggtacttctggctgaggct

SEQ ID NO: 6467 - DNA, 19 bp, Homo sapiens
tggtattcctagctgaaat

SEQ ID NO: 6468 - DNA, 17 bp, Homo sapiens
tggtgtcccagctgggt

SEQ ID NO: 6469 - DNA, 23 bp, Homo sapiens
tggtgtctcagctaagaatgcct

SEQ ID NO: 6470 - DNA, 22 bp, Homo sapiens
tggtaatcgctagaggttgcct

SEQ ID NO: 6471 - DNA, 19 bp, Homo sapiens
ggtattcctaaaaagttgc

SEQ ID NO: 6472 - DNA, 15 bp, Homo sapiens
tgcaaatgccacctg

SEQ ID NO: 6473 - DNA, 19 bp, Homo sapiens
gccttggggataccacctg

SEQ ID NO: 6474 - DNA, 18 bp, Homo sapiens
atgctactgatcacctga

SEQ ID NO: 6475 - DNA, 94 bp, Paramecium bursaria Chlorella virus 1
gtgggcgccgcgcgcgtgctctctcagtcgcgcctagctgcttccaacagacaaaagcggggcgttagtgagggagtgcgcgcgctgcgctgac

SEQ ID NO: 6476 - DNA, 21 bp, Paramecium bursaria Chlorella virus 1
gagtgcgcgcgctgcgctgac

SEQ ID NO: 6477 - DNA, 24 bp, Paramecium bursaria Chlorella virus 1
tctctcagtcgcgcctagctgctt

SEQ ID NO: 6478 - DNA, 17 bp, Homo sapiens
gagggccggctgcgctg

SEQ ID NO: 6479 - DNA, 18 bp, Homo sapiens
gagtgcgctgctgtgcga

SEQ ID NO: 6480 - DNA, 18 bp, Homo sapiens
gagctgcgccctgtgctg

SEQ ID NO: 6481 - DNA, 16 bp, Homo sapiens
gaggcggcccgcgctg

SEQ ID NO: 6482 - DNA, 18 bp, Homo sapiens
gtaggctgctgcgctgac

SEQ ID NO: 6483 - DNA, 20 bp, Homo sapiens
gagtgcggcgcgacgctgac

SEQ ID NO: 6484 - DNA, 16 bp, Homo sapiens
atgtgcacgctgctga

SEQ ID NO: 6485 - DNA, 19 bp, Homo sapiens
gagtgcgccccctactggc

SEQ ID NO: 6486 - DNA, 16 bp, Homo sapiens
gagtgggcaacgctga

SEQ ID NO: 6487 - DNA, 20 bp, Homo sapiens
gagtgcgcgccgacagctga

SEQ ID NO: 6488 - DNA, 17 bp, Homo sapiens
gactgcgcccggcgctg

SEQ ID NO: 6489 - DNA, 18 bp, Homo sapiens
gtgccacccgtgcgctga

SEQ ID NO: 6490 - DNA, 21 bp, Homo sapiens
agtgcgcgcgagacggcgctg

SEQ ID NO: 6491 - DNA, 18 bp, Homo sapiens
gagtgcgccggccggctg

SEQ ID NO: 6492 - DNA, 19 bp, Homo sapiens
gaggcgcgcgcgaggtggc

SEQ ID NO: 6493 - DNA, 19 bp, Homo sapiens
gagccctggcgctgcgctg

SEQ ID NO: 6494 - DNA, 18 bp, Homo sapiens
gcgcgcgcactcccgctg

SEQ ID NO: 6495 - DNA, 18 bp, Homo sapiens
ggtgcgcgccaagctggc

SEQ ID NO: 6496 - DNA, 17 bp, Homo sapiens
gcgcgcgcggacgtgac

SEQ ID NO: 6497 - DNA, 19 bp, Homo sapiens
gcgtgcgcgccccgctgac

SEQ ID NO: 6498 - DNA, 18 bp, Homo sapiens
gagcgcgcgcgctggagc

SEQ ID NO: 6499 - DNA, 19 bp, Homo sapiens
gagtgcgcgtcctccccgc

SEQ ID NO: 6500 - DNA, 21 bp, Homo sapiens
tcttagtcacaaaagctgctt

SEQ ID NO: 6501 - DNA, 23 bp, Homo sapiens
tctctcctgctgtttagctgctt

SEQ ID NO: 6502 - DNA, 72 bp, Paramecium bursaria Chlorella virus 1
aaagactcgctcaacagcccgaaaaccatcagcccgaccgccgatggattaggtgctgctggacaagtcttt

SEQ ID NO: 6503 - DNA, 24 bp, Paramecium bursaria Chlorella virus 1
tggattaggtgctgctggacaagt

SEQ ID NO: 6504 - DNA, 24 bp, Paramecium bursaria Chlorella virus 1
gctcaacagcccgaaaaccatcag

SEQ ID NO: 6505 - DNA, 26 bp, Homo sapiens
gctcaacagccctgcccttctatcag

SEQ ID NO: 6506 - DNA, 18 bp, Homo sapiens
gctcaacagtccagctca

SEQ ID NO: 6507 - DNA, 18 bp, Homo sapiens
gctcataaaagaccatca

SEQ ID NO: 6508 - DNA, 17 bp, Homo sapiens
cagcttaaaaccatcag

SEQ ID NO: 6509 - DNA, 23 bp, Homo sapiens
gctcagtgacccaataccatcag

SEQ ID NO: 6510 - DNA, 19 bp, Homo sapiens
gcccgacagcccgaagccc

SEQ ID NO: 6511 - DNA, 16 bp, Homo sapiens
gctcaaagcaaccatc

SEQ ID NO: 6512 - DNA, 93 bp, Paramecium bursaria Chlorella virus 1
gctctgaatttttctgcgcatgcgcgactcctcatctacataatttatgcacataaaaggattagcgcatgcaaattagtcagatagcagggc

SEQ ID NO: 6513 - DNA, 18 bp, Paramecium bursaria Chlorella virus 1
ttagtcagatagcagggc

SEQ ID NO: 6514 - DNA, 24 bp, Paramecium bursaria Chlorella virus 1
tctgaatttttctgcgcatgcgcg

SEQ ID NO: 6515 - DNA, 20 bp, Homo sapiens
tgaattttttctgtgctatg

SEQ ID NO: 6516 - DNA, 22 bp, Homo sapiens
tccgggtttgcgcgcatgtgcg

SEQ ID NO: 6517 - DNA, 72 bp, Paramecium bursaria Chlorella virus 1
ttgaccggcaagttccaggcatcctaagtgcttgatgtagacccttagggcaccagggactacctaggtcaa

SEQ ID NO: 6518 - DNA, 22 bp, Paramecium bursaria Chlorella virus 1
caccagggactacctaggtcaa

SEQ ID NO: 6519 - DNA, 24 bp, Paramecium bursaria Chlorella virus 1
gcaagttccaggcatcctaagtgc

SEQ ID NO: 6520 - DNA, 17 bp, Homo sapiens
gttccaaggcaacagtg

SEQ ID NO: 6521 - DNA, 22 bp, Homo sapiens
gcaagttccaggtcgtttcatg

SEQ ID NO: 6522 - DNA, 19 bp, Homo sapiens
gttccaggcatcacagtgc

SEQ ID NO: 6523 - DNA, 17 bp, Homo sapiens
gcagttccaggtgtcct

SEQ ID NO: 6524 - DNA, 16 bp, Homo sapiens
agttcagtcctaagtg

SEQ ID NO: 6525 - DNA, 19 bp, Homo sapiens
aagttccagtgcaaagtgc

SEQ ID NO: 6526 - DNA, 25 bp, Homo sapiens
gcaagctctagtctgtgcttaagtg

SEQ ID NO: 6527 - DNA, 25 bp, Homo sapiens
agttccagtggtgtgcacttaggat

SEQ ID NO: 6528 - DNA, 106 bp, Paramecium bursaria Chlorella virus 1
ctgctggacggaggtagtataatcagctaggcctcagtattctatgtaacaaatgaatgccctagagtactgcggtttagctagttatactgcccggttccaccag

SEQ ID NO: 6529 - DNA, 24 bp, Paramecium bursaria Chlorella virus 1
aggtagtataatcagctaggcctc

SEQ ID NO: 6530 - DNA, 24 bp, Paramecium bursaria Chlorella virus 1
tagagtactgcggtttagctagtt

SEQ ID NO: 6531 - DNA, 20 bp, Homo sapiens
gagtctgtggtcagctagtt

SEQ ID NO: 6532 - DNA, 87 bp, Paramecium bursaria Chlorella virus 1
cctggaggggtgtcacattctgtgaccgcgacgttgacgttagacacacgtcgctgccgtcctcagaatgtgatagcccatcacagg

SEQ ID NO: 6533 - DNA, 19 bp, Paramecium bursaria Chlorella virus 1
tgtgatagcccatcacagg

SEQ ID NO: 6534 - DNA, 24 bp, Paramecium bursaria Chlorella virus 1
tctgtgaccgcgacgttgacgtta

SEQ ID NO: 6535 - DNA, 19 bp, Homo sapiens
tctgtgactgggcaggttg

SEQ ID NO: 6536 - DNA, 61 bp, Paramecium bursaria Chlorella virus 1
gctgttgcgttggttgggagtttggggaccaaatttctataattggtgtcaccgcggcagc

SEQ ID NO: 6537 - DNA, 24 bp, Paramecium bursaria Chlorella virus 1
tgttgcgttggttgggagtttggg

SEQ ID NO: 6538 - DNA, 22 bp, Paramecium bursaria Chlorella virus 1
taattggtgtcaccgcggcagc

SEQ ID NO: 6539 - DNA, 20 bp, Homo sapiens
attggtgcaccagaatccag

SEQ ID NO: 6540 - DNA, 18 bp, Homo sapiens
tggaatcaccgcggcggc

SEQ ID NO: 6541 - DNA, 18 bp, Homo sapiens
taattggtgcactattgc

SEQ ID NO: 6542 - DNA, 18 bp, Homo sapiens
agcggtcgccgcggcggc

SEQ ID NO: 6543 - DNA, 18 bp, Homo sapiens
agtttccaccgcggtggc

SEQ ID NO: 6544 - DNA, 19 bp, Homo sapiens
attggtgcgttttacagag

SEQ ID NO: 6545 - DNA, 19 bp, Homo sapiens
attggtgcattttacagag

SEQ ID NO: 6546 - DNA, 20 bp, Homo sapiens
attggtgtgttttacagagc

SEQ ID NO: 6547 - DNA, 19 bp, Homo sapiens
tggttgcgattgcggcagc

SEQ ID NO: 6548 - DNA, 16 bp, Homo sapiens
taattgtgtcacgggc

SEQ ID NO: 6549 - DNA, 62 bp, Gallid herpesvirus 3
gtggctcgcgaccacccacctggattttggacctggcttttggacccgtggctcgcgaccac

SEQ ID NO: 6550 - DNA, 23 bp, Gallid herpesvirus 3
ttggacccgtggctcgcgaccac

SEQ ID NO: 6551 - DNA, 24 bp, Gallid herpesvirus 3
ctcgcgaccacccacctggatttt

SEQ ID NO: 6552 - DNA, 19 bp, Homo sapiens
cccgcggccgcccacctgg

SEQ ID NO: 6553 - DNA, 103 bp, Gallid herpesvirus 3
ggctgacccaaaattttaaaaattggggttagccatcctgtacaaaaatattactttttgagagggccaggctgacccaaaattttaaaaattggggttagcc

SEQ ID NO: 6554 - DNA, 24 bp, Gallid herpesvirus 3
agagggccaggctgacccaaaatt

SEQ ID NO: 6555 - DNA, 24 bp, Gallid herpesvirus 3
tttaaaaattggggttagccatcc

SEQ ID NO: 6556 - DNA, 20 bp, Homo sapiens
tttaaaaagtcaaggccatc

SEQ ID NO: 6557 - DNA, 19 bp, Homo sapiens
tttaaaaaataaggccatc

SEQ ID NO: 6558 - DNA, 20 bp, Homo sapiens
tttagaagttggggctcatc

SEQ ID NO: 6559 - DNA, 22 bp, Homo sapiens
tttaagaactgatacagccatc

SEQ ID NO: 6560 - DNA, 26 bp, Homo sapiens
tttaaaaatatgtataagttagccat

SEQ ID NO: 6561 - DNA, 21 bp, Homo sapiens
tttagaagttgaggttaagcc

SEQ ID NO: 6562 - DNA, 21 bp, Homo sapiens
tttaaaagcactttagccatc

SEQ ID NO: 6563 - DNA, 22 bp, Homo sapiens
tctgaaaatgaagttagctgtc

SEQ ID NO: 6564 - DNA, 66 bp, Gallid herpesvirus 3
ccggcatgcttctcgcccgatccccccgatctcacccggccgggcagatcctgtgagatgcgccgg

SEQ ID NO: 6565 - DNA, 24 bp, Gallid herpesvirus 3
cgggcagatcctgtgagatgcgcc

SEQ ID NO: 6566 - DNA, 24 bp, Gallid herpesvirus 3
cttctcgcccgatccccccgatct

SEQ ID NO: 6567 - DNA, 18 bp, Homo sapiens
cttcttttcgatcccccc

SEQ ID NO: 6568 - DNA, 15 bp, Homo sapiens
ttctgccaccccgat

SEQ ID NO: 6569 - DNA, 18 bp, Homo sapiens
cttctcgcccgctcctcc

SEQ ID NO: 6570 - DNA, 24 bp, Homo sapiens
cttctgcctttatttccctgatct

SEQ ID NO: 6571 - DNA, 22 bp, Homo sapiens
ctgcttgcctgcgccccgatct

SEQ ID NO: 6572 - DNA, 65 bp, Gallid herpesvirus 3
gcgcgcataatggcggacctaggcctaaaacccccaggaagcgggtctatggttggctgcgctgc

SEQ ID NO: 6573 - DNA, 21 bp, Gallid herpesvirus 3
gtctatggttggctgcgctgc

SEQ ID NO: 6574 - DNA, 24 bp, Gallid herpesvirus 3
tggcggacctaggcctaaaacccc

SEQ ID NO: 6575 - DNA, 20 bp, Homo sapiens
gtcatggttatggaggctgc

SEQ ID NO: 6576 - DNA, 18 bp, Homo sapiens
gctaggttggctgtgctg

SEQ ID NO: 6577 - DNA, 19 bp, Homo sapiens
gtctttggttggccagagc

SEQ ID NO: 6578 - DNA, 17 bp, Homo sapiens
gtccatggtacttgctg

SEQ ID NO: 6579 - DNA, 18 bp, Homo sapiens
ctgatggggctgcgctgc

SEQ ID NO: 6580 - DNA, 21 bp, Homo sapiens
gtcagtcgcgcgctgcgctgc

SEQ ID NO: 6581 - DNA, 19 bp, Homo sapiens
gcctgtttcctctgcgctg

SEQ ID NO: 6582 - DNA, 19 bp, Homo sapiens
tggggagggccctaaaacc

SEQ ID NO: 6583 - DNA, 23 bp, Homo sapiens
tgggggttttacacataaaaccc

SEQ ID NO: 6584 - DNA, 22 bp, Homo sapiens
tggcggaccaggcctacagccc

SEQ ID NO: 6585 - DNA, 16 bp, Homo sapiens
ggatctaggccccacc

SEQ ID NO: 6586 - DNA, 17 bp, Homo sapiens
tagcggacctactaaaa

SEQ ID NO: 6587 - DNA, 18 bp, Homo sapiens
ggactaggcctaagaccc

SEQ ID NO: 6588 - DNA, 19 bp, Homo sapiens
tgggggtctctccaaaacc

SEQ ID NO: 6589 - DNA, 105 bp, Gallid herpesvirus 3
agccctcagaccgcgtccgcgccccgggccagcctagcgtcgcaaacgtctggaagagtctgtggagtttggtttcgagggccgtgcggggaaacgcagagggct

SEQ ID NO: 6590 - DNA, 24 bp, Gallid herpesvirus 3
tctgtggagtttggtttcgagggc

SEQ ID NO: 6591 - DNA, 24 bp, Gallid herpesvirus 3
ggccagcctagcgtcgcaaacgtc

SEQ ID NO: 6592 - DNA, 18 bp, Homo sapiens
tctgtggagtttgcaggg

SEQ ID NO: 6593 - DNA, 18 bp, Homo sapiens
tctgggaggttttggggg

SEQ ID NO: 6594 - DNA, 17 bp, Homo sapiens
tgggggtcactcgaggg

SEQ ID NO: 6595 - DNA, 19 bp, Homo sapiens
tctgtgggtttgatgaggg

SEQ ID NO: 6596 - DNA, 64 bp, Gallid herpesvirus 3
cgttaaggtgtacgtgcgtgtacgagaccgcgtgcgagcggtctcgtcgtagtgcgtatgaacg

SEQ ID NO: 6597 - DNA, 24 bp, Gallid herpesvirus 3
taaggtgtacgtgcgtgtacgaga

SEQ ID NO: 6598 - DNA, 22 bp, Gallid herpesvirus 3
ctcgtcgtagtgcgtatgaacg

SEQ ID NO: 6599 - DNA, 18 bp, Homo sapiens
taaggcgtgtggtgtgag

SEQ ID NO: 6600 - DNA, 21 bp, Homo sapiens
agtgtgcgtgcgtgttagaga

SEQ ID NO: 6601 - DNA, 18 bp, Homo sapiens
aaggagtgcgtgtgtgag

SEQ ID NO: 6602 - DNA, 22 bp, Homo sapiens
ggtgtgtgcgcgcctgtgcgag

SEQ ID NO: 6603 - DNA, 62 bp, Gallid herpesvirus 3
gaatatttttaaagacttttttccccaacctctgggttgggttttttctctttaaaatattc

SEQ ID NO: 6604 - DNA, 24 bp, Gallid herpesvirus 3
ttaaagacttttttccccaacctc

SEQ ID NO: 6605 - DNA, 24 bp, Gallid herpesvirus 3
ttgggttttttctctttaaaatat

SEQ ID NO: 6606 - DNA, 19 bp, Homo sapiens
ttggttttttttctcaata

SEQ ID NO: 6607 - DNA, 18 bp, Homo sapiens
ttgggctttttcttttaa

SEQ ID NO: 6608 - DNA, 25 bp, Homo sapiens
gggttttttttttcccccttaaaat

SEQ ID NO: 6609 - DNA, 22 bp, Homo sapiens
ttgggtttcttcccccaaatat

SEQ ID NO: 6610 - DNA, 16 bp, Homo sapiens
ggttttccttaaaata

SEQ ID NO: 6611 - DNA, 131 bp, Gallid herpesvirus 3
cccggggagataggcgctcgcggagagggggttgggcgaaggacggggggggtggtgcctggcgcgcgccccagcccgttccgcacgtctttgccccttgctccagtttgcaggttccctctttctccagg

SEQ ID NO: 6612 - DNA, 24 bp, Gallid herpesvirus 3
cacgtctttgccccttgctccagt

SEQ ID NO: 6613 - DNA, 24 bp, Gallid herpesvirus 3
tcgcggagagggggttgggcgaag

SEQ ID NO: 6614 - DNA, 18 bp, Homo sapiens
tcccggagggggtgtggg

SEQ ID NO: 6615 - DNA, 19 bp, Homo sapiens
tcggggggaggggacgggg

SEQ ID NO: 6616 - DNA, 19 bp, Homo sapiens
tcgtggggagggggcaagg

SEQ ID NO: 6617 - DNA, 17 bp, Homo sapiens
tcgggggaggggaggcg

SEQ ID NO: 6618 - DNA, 20 bp, Homo sapiens
tcgcgggaggggagaaggcg

SEQ ID NO: 6619 - DNA, 17 bp, Homo sapiens
gggggaggctgggtgaa

SEQ ID NO: 6620 - DNA, 20 bp, Homo sapiens
gcggggagggcggggggcga

SEQ ID NO: 6621 - DNA, 15 bp, Homo sapiens
ggtggagttgggcga

SEQ ID NO: 6622 - DNA, 21 bp, Homo sapiens
tcgcgagggtcgggggtgggg

SEQ ID NO: 6623 - DNA, 25 bp, Homo sapiens
tcgctggagagggctggctgggcga

SEQ ID NO: 6624 - DNA, 17 bp, Homo sapiens
tcgtggggggggtgggg

SEQ ID NO: 6625 - DNA, 18 bp, Homo sapiens
tcggggggaggggggagg

SEQ ID NO: 6626 - DNA, 17 bp, Homo sapiens
tccgggggggggctggg

SEQ ID NO: 6627 - DNA, 15 bp, Homo sapiens
gcggggggcggggcg

SEQ ID NO: 6628 - DNA, 19 bp, Homo sapiens
cgcggggagggggcgcggg

SEQ ID NO: 6629 - DNA, 19 bp, Homo sapiens
tccggggagggggccagcg

SEQ ID NO: 6630 - DNA, 21 bp, Homo sapiens
tcgtgggaggggacacctgga

SEQ ID NO: 6631 - DNA, 18 bp, Homo sapiens
cgggaggggccggggcga

SEQ ID NO: 6632 - DNA, 18 bp, Homo sapiens
tcgcgggtgggggcgagg

SEQ ID NO: 6633 - DNA, 17 bp, Homo sapiens
tcgggggaggggggagg

SEQ ID NO: 6634 - DNA, 16 bp, Homo sapiens
cgggaggggagggcga

SEQ ID NO: 6635 - DNA, 19 bp, Homo sapiens
cgcggagggggccggggcg

SEQ ID NO: 6636 - DNA, 18 bp, Homo sapiens
tcgggggagggggtgggg

SEQ ID NO: 6637 - DNA, 19 bp, Homo sapiens
gcggagagcaggggtgggg

SEQ ID NO: 6638 - DNA, 20 bp, Homo sapiens
tcgcagagagtgggggtggg

SEQ ID NO: 6639 - DNA, 18 bp, Homo sapiens
tcgtggggagggggctgg

SEQ ID NO: 6640 - DNA, 19 bp, Homo sapiens
tcgcggcgaggagacggcg

SEQ ID NO: 6641 - DNA, 60 bp, Gallid herpesvirus 3
tcccccaaagacactctcggccgaccgcagagggataactgcggttgggcgcgtgggcga

SEQ ID NO: 6642 - DNA, 19 bp, Gallid herpesvirus 3
cggttgggcgcgtgggcga

SEQ ID NO: 6643 - DNA, 24 bp, Gallid herpesvirus 3
actctcggccgaccgcagagggat

SEQ ID NO: 6644 - DNA, 18 bp, Homo sapiens
tcttggggctgcagaggg

SEQ ID NO: 6645 - DNA, 19 bp, Homo sapiens
ctctcggcctggctgtggg

SEQ ID NO: 6646 - DNA, 18 bp, Homo sapiens
actctcggctgggcgcag

SEQ ID NO: 6647 - DNA, 60 bp, Gallid herpesvirus 3
gagagtgaccacacaagaagagaaaaaaagtcattttaaatttttttattggttaatttc

SEQ ID NO: 6648 - DNA, 24 bp, Gallid herpesvirus 3
ttaaatttttttattggttaattt

SEQ ID NO: 6649 - DNA, 24 bp, Gallid herpesvirus 3
cacaagaagagaaaaaaagtcatt

SEQ ID NO: 6650 - DNA, 19 bp, Homo sapiens
aagaagaggagaggtcact

SEQ ID NO: 6651 - DNA, 20 bp, Homo sapiens
taaagaagagaagagagaca

SEQ ID NO: 6652 - DNA, 18 bp, Homo sapiens
gagaaaacagaagtcatt

SEQ ID NO: 6653 - DNA, 22 bp, Homo sapiens
cactgagaggagaaaagtcatt

SEQ ID NO: 6654 - DNA, 23 bp, Homo sapiens
caagaagaggcacaaaggtcatt

SEQ ID NO: 6655 - DNA, 18 bp, Homo sapiens
aaagaaaaaagagtcatt

SEQ ID NO: 6656 - DNA, 18 bp, Homo sapiens
agagagactgaaagtcat

SEQ ID NO: 6657 - DNA, 18 bp, Homo sapiens
tgaagaagagagaaaagc

SEQ ID NO: 6658 - DNA, 20 bp, Homo sapiens
acaatgcgagaaaagtcatt

SEQ ID NO: 6659 - DNA, 20 bp, Homo sapiens
agagagagaaaacagtcatt

SEQ ID NO: 6660 - DNA, 18 bp, Homo sapiens
aaaggaaaagaagtcatt

SEQ ID NO: 6661 - DNA, 18 bp, Homo sapiens
caagaagaaaagaaaaat

SEQ ID NO: 6662 - DNA, 18 bp, Homo sapiens
caaagaagagaagaaaaa

SEQ ID NO: 6663 - DNA, 21 bp, Homo sapiens
gagagatcgctcaaagtcatt

SEQ ID NO: 6664 - DNA, 23 bp, Homo sapiens
caagaagagggtgcccagtcatt

SEQ ID NO: 6665 - DNA, 17 bp, Homo sapiens
caggaagagaaaaggcc

SEQ ID NO: 6666 - DNA, 18 bp, Homo sapiens
cacaagagggaaaaaaaa

SEQ ID NO: 6667 - DNA, 20 bp, Homo sapiens
cacaggaagagaagaagcat

SEQ ID NO: 6668 - DNA, 20 bp, Homo sapiens
agaagagaaaggacgcaagt

SEQ ID NO: 6669 - DNA, 24 bp, Homo sapiens
taaagaaaacaaaaaaaagtcatt

SEQ ID NO: 6670 - DNA, 15 bp, Homo sapiens
agaagagaagccact

SEQ ID NO: 6671 - DNA, 21 bp, Homo sapiens
cacaggaggaaaaaagccact

SEQ ID NO: 6672 - DNA, 16 bp, Homo sapiens
caagaagagaagaagt

SEQ ID NO: 6673 - DNA, 18 bp, Homo sapiens
agagggagagaaaaagcc

SEQ ID NO: 6674 - DNA, 82 bp, Human herpesvirus 7
agcagacaggttagagcactgttgtgtgatgtgagaggagtaagtgtgtctccaccatcgcataacagttgataggtgggct

SEQ ID NO: 6675 - DNA, 24 bp, Human herpesvirus 7
tgttgtgtgatgtgagaggagtaa

SEQ ID NO: 6676 - DNA, 22 bp, Human herpesvirus 7
cataacagttgataggtgggct

SEQ ID NO: 6677 - DNA, 18 bp, Homo sapiens
tagcagttgcagtgggct

SEQ ID NO: 6678 - DNA, 16 bp, Homo sapiens
acagccggggtgggct

SEQ ID NO: 6679 - DNA, 22 bp, Homo sapiens
caaacagttgagcaactgggct

SEQ ID NO: 6680 - DNA, 18 bp, Homo sapiens
cataacaggttgaagtgg

SEQ ID NO: 6681 - DNA, 18 bp, Homo sapiens
agcaaagacaggtgggct

SEQ ID NO: 6682 - DNA, 20 bp, Homo sapiens
caaaatgaggggggtgggct

SEQ ID NO: 6683 - DNA, 20 bp, Homo sapiens
caaaacagttgtgatgggct

SEQ ID NO: 6684 - DNA, 20 bp, Homo sapiens
cagttaacagggggtgggct

SEQ ID NO: 6685 - DNA, 17 bp, Homo sapiens
ataacagttgatcataa

SEQ ID NO: 6686 - DNA, 114 bp, Human herpesvirus 7
cgatgtgtttgacaatgtactctttgctttcaactgcagggtgttttagaatggcttcaacagattcattaaaatgttctgtggtccatagaaagctctgatcaaacttcattg

SEQ ID NO: 6687 - DNA, 24 bp, Human herpesvirus 7
tagaaagctctgatcaaacttcat

SEQ ID NO: 6688 - DNA, 24 bp, Human herpesvirus 7
tgtttgacaatgtactctttgctt

SEQ ID NO: 6689 - DNA, 19 bp, Homo sapiens
tgtttgccttttctttgct

SEQ ID NO: 6690 - DNA, 18 bp, Homo sapiens
tgtttgaaaatctttgct

SEQ ID NO: 6691 - DNA, 67 bp, Human herpesvirus 7
tctggatcttggtaggcggccgcgagggactgttgcttcttgtgctgtgaattctatcttgactgga

SEQ ID NO: 6692 - DNA, 24 bp, Human herpesvirus 7
cttgtgctgtgaattctatcttga

SEQ ID NO: 6693 - DNA, 24 bp, Human herpesvirus 7
tggtaggcggccgcgagggactgt

SEQ ID NO: 6694 - DNA, 23 bp, Homo sapiens
ggaggccggaggtgagggactgt

SEQ ID NO: 6695 - DNA, 68 bp, Human herpesvirus 7
aatgctatggaattagtagtgggacccgggcgtggtccagtatcctgggtctggccgcttgtagcatt

SEQ ID NO: 6696 - DNA, 24 bp, Human herpesvirus 7
tatggaattagtagtgggacccgg

SEQ ID NO: 6697 - DNA, 19 bp, Human herpesvirus 7
tctggccgcttgtagcatt

SEQ ID NO: 6698 - DNA, 17 bp, Homo sapiens
tcttggcaaatagcatt

SEQ ID NO: 6699 - DNA, 16 bp, Homo sapiens
tcaggcacatagcatt

SEQ ID NO: 6700 - DNA, 18 bp, Homo sapiens
tctgacttgtgtagcatt

SEQ ID NO: 6701 - DNA, 14 bp, Homo sapiens
tctgactgcagcat

SEQ ID NO: 6702 - DNA, 16 bp, Homo sapiens
tctagagtgtagcatt

SEQ ID NO: 6703 - DNA, 17 bp, Homo sapiens
tctgaccaaagagcatt

SEQ ID NO: 6704 - DNA, 18 bp, Homo sapiens
tcaggctgcgatagcatt

SEQ ID NO: 6705 - DNA, 18 bp, Homo sapiens
cctggccatgttggcatt

SEQ ID NO: 6706 - DNA, 18 bp, Homo sapiens
tctgcttgtcgcagcatt

SEQ ID NO: 6707 - DNA, 82 bp, Human herpesvirus 6
cccaatgtgcaaatgtggtttgtatggctactttgtgttcctaaaaaatgcaacaatagaagtggaaaccctcagtcacggg

SEQ ID NO: 6708 - DNA, 24 bp, Human herpesvirus 6
gaagtggaaaccctcagtcacggg

SEQ ID NO: 6709 - DNA, 24 bp, Human herpesvirus 6
tatggctactttgtgttcctaaaa

SEQ ID NO: 6710 - DNA, 21 bp, Homo sapiens
gaagtggagattcccaaacgg

SEQ ID NO: 6711 - DNA, 18 bp, Homo sapiens
gaagtggagacagcatgg

SEQ ID NO: 6712 - DNA, 20 bp, Homo sapiens
gaagaccccttggtcgtggg

SEQ ID NO: 6713 - DNA, 20 bp, Homo sapiens
gtgaagtcctcaatcaaggg

SEQ ID NO: 6714 - DNA, 22 bp, Homo sapiens
gaggtgaggtcctcatcacagg

SEQ ID NO: 6715 - DNA, 18 bp, Homo sapiens
gaagggaaacccaagcgg

SEQ ID NO: 6716 - DNA, 17 bp, Homo sapiens
gaagtggaagcactagg

SEQ ID NO: 6717 - DNA, 21 bp, Homo sapiens
gaagtggaaaattcttagagg

SEQ ID NO: 6718 - DNA, 19 bp, Homo sapiens
tatggcactttatatccta

SEQ ID NO: 6719 - DNA, 16 bp, Homo sapiens
tggcttctatgctcct

SEQ ID NO: 6720 - DNA, 21 bp, Homo sapiens
gctactttgtagtttttaaaa

SEQ ID NO: 6721 - DNA, 21 bp, Homo sapiens
tatggcagtttacatttctaa

SEQ ID NO: 6722 - DNA, 19 bp, Homo sapiens
tatggctattctctttctg

SEQ ID NO: 6723 - DNA, 18 bp, Homo sapiens
tggttcaccctgttccta

SEQ ID NO: 6724 - DNA, 89 bp, Human herpesvirus 6
gcgacctcgtgaatatgaggaccaacaaccctgtgcttggcgctcaggcgcaagtgtgtgtaatttgtcctccagatcgcagcaatcgc

SEQ ID NO: 6725 - DNA, 24 bp, Human herpesvirus 6
tgaggaccaacaaccctgtgcttg

SEQ ID NO: 6726 - DNA, 24 bp, Human herpesvirus 6
tttgtcctccagatcgcagcaatc

SEQ ID NO: 6727 - DNA, 20 bp, Homo sapiens
ggaatataactttgtgcttg

SEQ ID NO: 6728 - DNA, 18 bp, Homo sapiens
taagggtcagcaaccctg

SEQ ID NO: 6729 - DNA, 21 bp, Homo sapiens
tggggccaggctctgtgcttg

SEQ ID NO: 6730 - DNA, 14 bp, Homo sapiens
aggaccaatgtgct

SEQ ID NO: 6731 - DNA, 20 bp, Homo sapiens
tgaggaccacagctctgtgc

SEQ ID NO: 6732 - DNA, 18 bp, Homo sapiens
tttgtccttttggatcca

SEQ ID NO: 6733 - DNA, 20 bp, Homo sapiens
tttgtcctctggtaacagat

SEQ ID NO: 6734 - DNA, 65 bp, Human herpesvirus 6
actaaccctaattcgatagcatatgcttcccgttgggtaacatatgctattgaattagggttagt

SEQ ID NO: 6735 - DNA, 24 bp, Human herpesvirus 6
accctaattcgatagcatatgctt

SEQ ID NO: 6736 - DNA, 24 bp, Human herpesvirus 6
gtaacatatgctattgaattaggg

SEQ ID NO: 6737 - DNA, 23 bp, Homo sapiens
cctagtcaatgaggtatatgctt

SEQ ID NO: 6738 - DNA, 19 bp, Homo sapiens
acccttgtttaaatatgct

SEQ ID NO: 6739 - DNA, 27 bp, Homo sapiens
accctaatttgtagtttaagcatatgc

SEQ ID NO: 6740 - DNA, 20 bp, Homo sapiens
cctaattctcagcttatatg

SEQ ID NO: 6741 - DNA, 123 bp, Human herpesvirus 6
tatcgcagcgttgcgacatcgtctcctacattctcgttgaataataagcctaagaaattttgcatgcattgcgagattgtaatattcaagcgaagtgaagaatttatgttcagccttgcggta

SEQ ID NO: 6742 - DNA, 24 bp, Human herpesvirus 6
tcgcagcgttgcgacatcgtctcc

SEQ ID NO: 6743 - DNA, 24 bp, Human herpesvirus 6
cgagattgtaatattcaagcgaag

SEQ ID NO: 6744 - DNA, 15 bp, Homo sapiens
gcagcgccattgtct

SEQ ID NO: 6745 - DNA, 83 bp, Human herpesvirus 6
agcggggtctcggagctcctaggtcagaccacgaaaggtcagcctgcaaggtggatggcgtgttttctgaggttatccccgct

SEQ ID NO: 6746 - DNA, 24 bp, Human herpesvirus 6
tggcgtgttttctgaggttatccc

SEQ ID NO: 6747 - DNA, 24 bp, Human herpesvirus 6
tcggagctcctaggtcagaccacg

SEQ ID NO: 6748 - DNA, 16 bp, Homo sapiens
tgggtgtagggttatc

SEQ ID NO: 6749 - DNA, 20 bp, Homo sapiens
tggggtgttttctaaatgtt

SEQ ID NO: 6750 - DNA, 21 bp, Homo sapiens
tggtggttttctgcccctccc

SEQ ID NO: 6751 - DNA, 18 bp, Homo sapiens
gtgttttctatatatccc

SEQ ID NO: 6752 - DNA, 23 bp, Homo sapiens
tgggtgttttctaaaatttatcc

SEQ ID NO: 6753 - DNA, 17 bp, Homo sapiens
gtgctgttgggttgtcc

SEQ ID NO: 6754 - DNA, 19 bp, Homo sapiens
tcggagcctctgcagcgtc

SEQ ID NO: 6755 - DNA, 20 bp, Homo sapiens
tcagagcttcctccaagatc

SEQ ID NO: 6756 - DNA, 21 bp, Homo sapiens
ggagctcctgaaagccggcca

SEQ ID NO: 6757 - DNA, 19 bp, Homo sapiens
tcggagcttcgtgggaacc

SEQ ID NO: 6758 - DNA, 60 bp, Human herpesvirus 6
gacattaattcttacgctcatgggtacttcggtgacgacccttatgcgttaaaatgtgtt

SEQ ID NO: 6759 - DNA, 24 bp, Human herpesvirus 6
tcttacgctcatgggtacttcggt

SEQ ID NO: 6760 - DNA, 23 bp, Human herpesvirus 6
acccttatgcgttaaaatgtgtt

SEQ ID NO: 6761 - DNA, 20 bp, Homo sapiens
cctctagagtaaaatgtgtt

SEQ ID NO: 6762 - DNA, 21 bp, Homo sapiens
cctgaagctttgaaatgtgtt

SEQ ID NO: 6763 - DNA, 19 bp, Homo sapiens
cctttagtaaaaatgtgtt

SEQ ID NO: 6764 - DNA, 18 bp, Homo sapiens
accctgtctcaaatgtgt

SEQ ID NO: 6765 - DNA, 128 bp, Tupaia herpesvirus
ctcccgggtacttactcgctaactctcgctgctcgggctcggtaaacttgacgcgcttagtttcgtcacagaaggcgtccatgttgatcaggtcatcggccgtgggttcaaagtcatggttcccgggg

SEQ ID NO: 6766 - DNA, 24 bp, Tupaia herpesvirus
cgtccatgttgatcaggtcatcgg

SEQ ID NO: 6767 - DNA, 24 bp, Tupaia herpesvirus
tctcgctgctcgggctcggtaaac

SEQ ID NO: 6768 - DNA, 17 bp, Homo sapiens
cgccatgttggttaggc

SEQ ID NO: 6769 - DNA, 15 bp, Homo sapiens
gtccatgttgacacc

SEQ ID NO: 6770 - DNA, 21 bp, Homo sapiens
tctcgctgctcgggatcccgg

SEQ ID NO: 6771 - DNA, 19 bp, Homo sapiens
tctcgctgccgggccgcgc

SEQ ID NO: 6772 - DNA, 23 bp, Homo sapiens
tctcgctgcttagggcccccggt

SEQ ID NO: 6773 - DNA, 81 bp, Tupaia herpesvirus
ggaaaacgtaaaggtgggcccggtcagctggacgtccgagtctccgatgcctaacctgatacctggatctacctatgttcc

SEQ ID NO: 6774 - DNA, 24 bp, Tupaia herpesvirus
tgcctaacctgatacctggatcta

SEQ ID NO: 6775 - DNA, 24 bp, Tupaia herpesvirus
aaggtgggcccggtcagctggacg

SEQ ID NO: 6776 - DNA, 18 bp, Homo sapiens
tgctgggtgcacctggat

SEQ ID NO: 6777 - DNA, 17 bp, Homo sapiens
taactcaagctggatct

SEQ ID NO: 6778 - DNA, 19 bp, Homo sapiens
tgccgacaactctggatct

SEQ ID NO: 6779 - DNA, 21 bp, Homo sapiens
ccttggcaacatctggatcta

SEQ ID NO: 6780 - DNA, 20 bp, Homo sapiens
aagctgggcctggggcagga

SEQ ID NO: 6781 - DNA, 22 bp, Homo sapiens
ggagtggggactcggctggacg

SEQ ID NO: 6782 - DNA, 23 bp, Homo sapiens
ggagggcccagcccggctgggcg

SEQ ID NO: 6783 - DNA, 17 bp, Homo sapiens
ggagggcccgggaggac

SEQ ID NO: 6784 - DNA, 20 bp, Homo sapiens
aggtgggctctggcagcggg

SEQ ID NO: 6785 - DNA, 17 bp, Homo sapiens
ggtgggcctggtgctgg

SEQ ID NO: 6786 - DNA, 21 bp, Homo sapiens
aaggtgggcctggcctagaca

SEQ ID NO: 6787 - DNA, 19 bp, Homo sapiens
aggtgggcccgttcctctg

SEQ ID NO: 6788 - DNA, 15 bp, Homo sapiens
ggtgggccctgggga

SEQ ID NO: 6789 - DNA, 18 bp, Homo sapiens
aaggagggcccggtgcgg

SEQ ID NO: 6790 - DNA, 16 bp, Homo sapiens
aaggtgggtgggctgg

SEQ ID NO: 6791 - DNA, 19 bp, Homo sapiens
agggggcattctcagctgg

SEQ ID NO: 6792 - DNA, 17 bp, Homo sapiens
agctgggcgagctggac

SEQ ID NO: 6793 - DNA, 15 bp, Homo sapiens
ggtgggcaagctggc

SEQ ID NO: 6794 - DNA, 21 bp, Homo sapiens
aaggtgagcccgatgtgggcg

SEQ ID NO: 6795 - DNA, 20 bp, Homo sapiens
aggtgggcctcgttagactg

SEQ ID NO: 6796 - DNA, 103 bp, Tupaia herpesvirus
tgtatttatgtttatttttttattatttattaatatatttgtgttaaaattattttctacattaatattatttaataaattaaaataaggtttatattttaca

SEQ ID NO: 6797 - DNA, 24 bp, Tupaia herpesvirus
tttatgtttatttttttattattt

SEQ ID NO: 6798 - DNA, 24 bp, Tupaia herpesvirus
ttaatattatttaataaattaaaa

SEQ ID NO: 6799 - DNA, 18 bp, Homo sapiens
tatgtttatttatttatt

SEQ ID NO: 6800 - DNA, 87 bp, Tupaia herpesvirus
ttgtaataacattatttacattaaatttatcatttaatatttttcttaaatgtatttcagtttcatgtggtttatttgttattataa

SEQ ID NO: 6801 - DNA, 24 bp, Tupaia herpesvirus
attaaatttatcatttaatatttt

SEQ ID NO: 6802 - DNA, 24 bp, Tupaia herpesvirus
catgtggtttatttgttattataa

SEQ ID NO: 6803 - DNA, 23 bp, Homo sapiens
catgtggttatgcagagattata

SEQ ID NO: 6804 - DNA, 18 bp, Homo sapiens
atgcggtttgtttttgtt

SEQ ID NO: 6805 - DNA, 20 bp, Homo sapiens
tgtggcctttgttattataa

SEQ ID NO: 6806 - DNA, 18 bp, Homo sapiens
catgtggtttgcttgtca

SEQ ID NO: 6807 - DNA, 23 bp, Homo sapiens
caggtggtttagatgcattataa

SEQ ID NO: 6808 - DNA, 18 bp, Homo sapiens
atggggttctcttgttat

SEQ ID NO: 6809 - DNA, 70 bp, Tupaia herpesvirus
cgccggtggcgcgtccgcgcggcgggtgaggaaaaccgtccctcctcggcgcgacggacgcgtagcggcg

SEQ ID NO: 6810 - DNA, 24 bp, Tupaia herpesvirus
tcggcgcgacggacgcgtagcggc

SEQ ID NO: 6811 - DNA, 24 bp, Tupaia herpesvirus
gcgcgtccgcgcggcgggtgagga

SEQ ID NO: 6812 - DNA, 19 bp, Homo sapiens
tcggcgcggcgcggctcgg

SEQ ID NO: 6813 - DNA, 23 bp, Homo sapiens
tcggcggcggcggcggcagcggc

SEQ ID NO: 6814 - DNA, 19 bp, Homo sapiens
tcggcgcgagggcgctggc

SEQ ID NO: 6815 - DNA, 18 bp, Homo sapiens
ccggcgcggtgggtgcgc

SEQ ID NO: 6816 - DNA, 21 bp, Homo sapiens
tcggcgcggtcgggcggcggc

SEQ ID NO: 6817 - DNA, 18 bp, Homo sapiens
tcggcgcggcggcggcgg

SEQ ID NO: 6818 - DNA, 17 bp, Homo sapiens
cggcgcggcggcggcgg

SEQ ID NO: 6819 - DNA, 96 bp, Tupaia herpesvirus
gtagaagtctcaggctagccggcagccccaaaataaacgtgtcgtctcgaacggaactaaataccgggtgtgtgtctctgtgtgtgaggtctctgc

SEQ ID NO: 6820 - DNA, 24 bp, Tupaia herpesvirus
agtctcaggctagccggcagcccc

SEQ ID NO: 6821 - DNA, 20 bp, Tupaia herpesvirus
tctgtgtgtgaggtctctgc

SEQ ID NO: 6822 - DNA, 19 bp, Homo sapiens
tcgggctgctgcagcagcc

SEQ ID NO: 6823 - DNA, 18 bp, Homo sapiens
gctcaggctcgcggctcc

SEQ ID NO: 6824 - DNA, 18 bp, Homo sapiens
agctcagggaggcagccc

SEQ ID NO: 6825 - DNA, 20 bp, Homo sapiens
gttccgggcgaggcagcccc

SEQ ID NO: 6826 - DNA, 22 bp, Homo sapiens
gtcccgggacactggcagcccc

SEQ ID NO: 6827 - DNA, 16 bp, Homo sapiens
agtcccaggctcagcc

SEQ ID NO: 6828 - DNA, 23 bp, Homo sapiens
aggctcaggctcctccggcagcc

SEQ ID NO: 6829 - DNA, 16 bp, Homo sapiens
gcctcaggcgcggtcc

SEQ ID NO: 6830 - DNA, 17 bp, Homo sapiens
aatctcaggcctgtggc

SEQ ID NO: 6831 - DNA, 17 bp, Homo sapiens
agctcaggctggctgcc

SEQ ID NO: 6832 - DNA, 19 bp, Homo sapiens
agcctcaggcagtggcccc

SEQ ID NO: 6833 - DNA, 16 bp, Homo sapiens
agtctcagagcggcag

SEQ ID NO: 6834 - DNA, 18 bp, Homo sapiens
agtctccaagtcggcagc

SEQ ID NO: 6835 - DNA, 18 bp, Homo sapiens
gctcaggcttcctggccc

SEQ ID NO: 6836 - DNA, 16 bp, Homo sapiens
atctcaggctgggtcc

SEQ ID NO: 6837 - DNA, 15 bp, Homo sapiens
gcctcaggctcagcc

SEQ ID NO: 6838 - DNA, 22 bp, Homo sapiens
agcctcacggtccggcagcccc

SEQ ID NO: 6839 - DNA, 19 bp, Homo sapiens
gtctcagatgcgtagttcc

SEQ ID NO: 6840 - DNA, 23 bp, Homo sapiens
gctcaggccccgggggcagcccc

SEQ ID NO: 6841 - DNA, 20 bp, Homo sapiens
agctcaagcctggcagctcc

SEQ ID NO: 6842 - DNA, 21 bp, Homo sapiens
agccttgggtccagcagcccc

SEQ ID NO: 6843 - DNA, 20 bp, Homo sapiens
agtcccaggcgtctgcagcc

SEQ ID NO: 6844 - DNA, 23 bp, Homo sapiens
gctcaggctgggcgcgcggcccc

SEQ ID NO: 6845 - DNA, 22 bp, Homo sapiens
agactccggggccggcagtccc

SEQ ID NO: 6846 - DNA, 22 bp, Homo sapiens
agcctcaggccccactggcagc

SEQ ID NO: 6847 - DNA, 20 bp, Homo sapiens
tccaggctggagccagctcc

SEQ ID NO: 6848 - DNA, 19 bp, Homo sapiens
gtctcaggcctttggcccc

SEQ ID NO: 6849 - DNA, 18 bp, Homo sapiens
gtccaggcgggcagtccc

SEQ ID NO: 6850 - DNA, 16 bp, Homo sapiens
gtccggcgccggcagc

SEQ ID NO: 6851 - DNA, 24 bp, Homo sapiens
agtctcagcctggtccctggtccc

SEQ ID NO: 6852 - DNA, 18 bp, Homo sapiens
agcctcaggctgcagccc

SEQ ID NO: 6853 - DNA, 23 bp, Homo sapiens
gtctggggttctctggcagcccc

SEQ ID NO: 6854 - DNA, 23 bp, Homo sapiens
gctcgggcgcccctggcagcccc

SEQ ID NO: 6855 - DNA, 21 bp, Homo sapiens
gtctcaggttccttcagctcc

SEQ ID NO: 6856 - DNA, 19 bp, Homo sapiens
gctcaggcccctgcagtcc

SEQ ID NO: 6857 - DNA, 15 bp, Homo sapiens
gtcccaggctgcagc

SEQ ID NO: 6858 - DNA, 19 bp, Homo sapiens
agtcccaggctggaggccc

SEQ ID NO: 6859 - DNA, 23 bp, Homo sapiens
atctcaggctggccctggacccc

SEQ ID NO: 6860 - DNA, 25 bp, Homo sapiens
gtctcaggcgggctcggcgcgcccc

SEQ ID NO: 6861 - DNA, 23 bp, Homo sapiens
agtcccaggctggctgcagcccc

SEQ ID NO: 6862 - DNA, 19 bp, Homo sapiens
agtctcagttactagttcc

SEQ ID NO: 6863 - DNA, 20 bp, Homo sapiens
gtctcaggctgacgcattcc

SEQ ID NO: 6864 - DNA, 19 bp, Homo sapiens
agctcaggctctttcagcc

SEQ ID NO: 6865 - DNA, 19 bp, Homo sapiens
agtctcaggttcgggctcc

SEQ ID NO: 6866 - DNA, 70 bp, Tupaia herpesvirus
ggcgcgtcggcggccgtgactcgagcggcgagcgccggccgttcgatgagccgcccgaagggacagcgcc

SEQ ID NO: 6867 - DNA, 24 bp, Tupaia herpesvirus
ttcgatgagccgcccgaagggaca

SEQ ID NO: 6868 - DNA, 24 bp, Tupaia herpesvirus
cggccgtgactcgagcggcgagcg

SEQ ID NO: 6869 - DNA, 19 bp, Homo sapiens
gatgagccggttgagaaag

SEQ ID NO: 6870 - DNA, 60 bp, Simian T-lymphotropic virus 1
gtgtttatataattgtttaggggcaagtcagattacagtagattttaaaaatatttacac

SEQ ID NO: 6871 - DNA, 24 bp, Simian T-lymphotropic virus 1
agattacagtagattttaaaaata

SEQ ID NO: 6872 - DNA, 24 bp, Simian T-lymphotropic virus 1
tatataattgtttaggggcaagtc

SEQ ID NO: 6873 - DNA, 24 bp, Homo sapiens
agactatccaaaattttaaaaata

SEQ ID NO: 6874 - DNA, 18 bp, Homo sapiens
ttacagtagacaggcaaa

SEQ ID NO: 6875 - DNA, 21 bp, Homo sapiens
attacataaattttaaaaata

SEQ ID NO: 6876 - DNA, 23 bp, Homo sapiens
aggtcacagtgaaggtaaaaata

SEQ ID NO: 6877 - DNA, 19 bp, Homo sapiens
gaatacagtagttaaaaat

SEQ ID NO: 6878 - DNA, 19 bp, Homo sapiens
acagctggattttaaaaat

SEQ ID NO: 6879 - DNA, 63 bp, Simian T-lymphotropic virus 1
ttttttggttattggaaatgagatttctgaaaatctccttgataagatttccatttcaaaaga

SEQ ID NO: 6880 - DNA, 24 bp, Simian T-lymphotropic virus 1
atctccttgataagatttccattt

SEQ ID NO: 6881 - DNA, 24 bp, Simian T-lymphotropic virus 1
tattggaaatgagatttctgaaaa

SEQ ID NO: 6882 - DNA, 23 bp, Homo sapiens
atctttattgaccttttccattt

SEQ ID NO: 6883 - DNA, 16 bp, Homo sapiens
atctcctgttttccat

SEQ ID NO: 6884 - DNA, 15 bp, Homo sapiens
tctccttggtaccat

SEQ ID NO: 6885 - DNA, 17 bp, Homo sapiens
tctccaggatttccatt

SEQ ID NO: 6886 - DNA, 15 bp, Homo sapiens
tcccctggtttccat

SEQ ID NO: 6887 - DNA, 18 bp, Homo sapiens
atcctcttgataaggttc

SEQ ID NO: 6888 - DNA, 17 bp, Homo sapiens
atcttctgataagattt

SEQ ID NO: 6889 - DNA, 16 bp, Homo sapiens
tccctcggtttccatt

SEQ ID NO: 6890 - DNA, 73 bp, Fowlpox virus
tattatgtatttttattccgctagaactatagatgctaatgtagaaacaaagaaggattaaaaatagattgta

SEQ ID NO: 6891 - DNA, 24 bp, Fowlpox virus
tatgtatttttattccgctagaac

SEQ ID NO: 6892 - DNA, 24 bp, Fowlpox virus
tagaaacaaagaaggattaaaaat

SEQ ID NO: 6893 - DNA, 20 bp, Homo sapiens
catgttttattctgctagaa

SEQ ID NO: 6894 - DNA, 63 bp, Fowlpox virus
ggagctaataaatacacgggtaagcggacggatatacggcgatataagtgtattggaagctct

SEQ ID NO: 6895 - DNA, 19 bp, Fowlpox virus
taagtgtattggaagctct

SEQ ID NO: 6896 - DNA, 24 bp, Fowlpox virus
taaatacacgggtaagcggacgga

SEQ ID NO: 6897 - DNA, 18 bp, Homo sapiens
caagcatatggaggctct

SEQ ID NO: 6898 - DNA, 17 bp, Homo sapiens
aagccacaggaagctct

SEQ ID NO: 6899 - DNA, 17 bp, Homo sapiens
aagcaatgggaagctct

SEQ ID NO: 6900 - DNA, 16 bp, Homo sapiens
taactgtagaagctct

SEQ ID NO: 6901 - DNA, 14 bp, Homo sapiens
caagtgctgggctc

SEQ ID NO: 6902 - DNA, 16 bp, Homo sapiens
aagtgcaaaaagctct

SEQ ID NO: 6903 - DNA, 18 bp, Homo sapiens
agtgaccatggaagctct

SEQ ID NO: 6904 - DNA, 17 bp, Homo sapiens
caagtgccagaagctct

SEQ ID NO: 6905 - DNA, 16 bp, Homo sapiens
caagtgacaaagctct

SEQ ID NO: 6906 - DNA, 19 bp, Homo sapiens
taagtgtatgtccaaagct

SEQ ID NO: 6907 - DNA, 16 bp, Homo sapiens
taactgctgaagctct

SEQ ID NO: 6908 - DNA, 21 bp, Homo sapiens
aaatatacagttggaagctct

SEQ ID NO: 6909 - DNA, 18 bp, Homo sapiens
aagtgatacctgagctct

SEQ ID NO: 6910 - DNA, 19 bp, Homo sapiens
taagtgtatggtatatgct

SEQ ID NO: 6911 - DNA, 18 bp, Homo sapiens
taaatgctcatgagctct

SEQ ID NO: 6912 - DNA, 21 bp, Homo sapiens
caagtgtatatggctggttct

SEQ ID NO: 6913 - DNA, 131 bp, Fowlpox virus
gttctgatctttcttgtacatgttcaagttttcggcggttaagatgctttagagatagttcaagattttagattcaaaacatcacttatctccacagatcatttccaagcaattgtacagaaagatagaat

SEQ ID NO: 6914 - DNA, 24 bp, Fowlpox virus
ttcaagttttcggcggttaagatg

SEQ ID NO: 6915 - DNA, 24 bp, Fowlpox virus
tcaaaacatcacttatctccacag

SEQ ID NO: 6916 - DNA, 18 bp, Homo sapiens
tcaaagtgtcacttactc

SEQ ID NO: 6917 - DNA, 22 bp, Homo sapiens
tcaagtacaagagtctccacag

SEQ ID NO: 6918 - DNA, 21 bp, Homo sapiens
tcaaggattcagcctccacag

SEQ ID NO: 6919 - DNA, 18 bp, Homo sapiens
caccacttatctttacag

SEQ ID NO: 6920 - DNA, 25 bp, Homo sapiens
ccaaaacatcagcttctctccacag

SEQ ID NO: 6921 - DNA, 19 bp, Homo sapiens
aaaacgtcacttatcacag

SEQ ID NO: 6922 - DNA, 26 bp, Homo sapiens
tcaaaacaatacttatcaccatacag

SEQ ID NO: 6923 - DNA, 18 bp, Homo sapiens
tcaaaacacacatccaca

SEQ ID NO: 6924 - DNA, 18 bp, Homo sapiens
tcaaacatcacttgttct

SEQ ID NO: 6925 - DNA, 20 bp, Homo sapiens
tcaaaggcatttcatctcca

SEQ ID NO: 6926 - DNA, 69 bp, Fowlpox virus
ggatatcctgtagtttttgatggttttttggttgatgacttacacaagatcaaaagttactggtaatcc

SEQ ID NO: 6927 - DNA, 24 bp, Fowlpox virus
atcctgtagtttttgatggttttt

SEQ ID NO: 6928 - DNA, 24 bp, Fowlpox virus
ttacacaagatcaaaagttactgg

SEQ ID NO: 6929 - DNA, 18 bp, Homo sapiens
tgtagtttttttgttttt

SEQ ID NO: 6930 - DNA, 21 bp, Homo sapiens
tcctgcagttttgtgcttttt

SEQ ID NO: 6931 - DNA, 17 bp, Homo sapiens
cctgtaaagatggtttt

SEQ ID NO: 6932 - DNA, 19 bp, Homo sapiens
tgagattttgatggttttt

SEQ ID NO: 6933 - DNA, 21 bp, Homo sapiens
atcctgagccaagtggttttt

SEQ ID NO: 6934 - DNA, 22 bp, Homo sapiens
acaagatcatcctggttgctgg

SEQ ID NO: 6935 - DNA, 19 bp, Homo sapiens
tacacaaaaaagttactgg

SEQ ID NO: 6936 - DNA, 101 bp, Fowlpox virus
tcatagatatgatacaacacaacactacaaattatatgagttaaaaaatatagaatatctaataaataatttatgtaatactagctagtgtttatttatga

SEQ ID NO: 6937 - DNA, 24 bp, Fowlpox virus
tgagttaaaaaatatagaatatct

SEQ ID NO: 6938 - DNA, 24 bp, Fowlpox virus
tgtaatactagctagtgtttattt

SEQ ID NO: 6939 - DNA, 23 bp, Homo sapiens
tgagttcaaaagcatgaatatct

SEQ ID NO: 6940 - DNA, 18 bp, Homo sapiens
tgagttaaatgaatatag

SEQ ID NO: 6941 - DNA, 23 bp, Homo sapiens
tgaggtaaacacatagaatatct

SEQ ID NO: 6942 - DNA, 65 bp, Equine foamy virus
gtctgagggatggctcgtccaacaaaccacacatcgaggaatgtaatacctgtcctctctcagat

SEQ ID NO: 6943 - DNA, 24 bp, Equine foamy virus
tgagggatggctcgtccaacaaac

SEQ ID NO: 6944 - DNA, 22 bp, Equine foamy virus
taatacctgtcctctctcagat

SEQ ID NO: 6945 - DNA, 20 bp, Homo sapiens
gagggatgaacccgacggac

SEQ ID NO: 6946 - DNA, 15 bp, Homo sapiens
tgagagatggttcca

SEQ ID NO: 6947 - DNA, 21 bp, Homo sapiens
tgagggaaggtggaacagcaa

SEQ ID NO: 6948 - DNA, 17 bp, Homo sapiens
tggggagatgcccaaca

SEQ ID NO: 6949 - DNA, 17 bp, Homo sapiens
gagggatatctgacaaa

SEQ ID NO: 6950 - DNA, 16 bp, Homo sapiens
taatacctgcctcaga

SEQ ID NO: 6951 - DNA, 18 bp, Homo sapiens
cctcattctctctcagat

SEQ ID NO: 6952 - DNA, 17 bp, Homo sapiens
taatacctgtaaaccag

SEQ ID NO: 6953 - DNA, 22 bp, Homo sapiens
taatatctgcccccaggcagat

SEQ ID NO: 6954 - DNA, 19 bp, Homo sapiens
taataattccttctcagat

SEQ ID NO: 6955 - DNA, 87 bp, Equine foamy virus
tacagtttgcccaatgtaaacgataagcaataaaggtcataaacagatgaacttttaagattttatttttcatacactcgagctgta

SEQ ID NO: 6956 - DNA, 24 bp, Equine foamy virus
taaacgataagcaataaaggtcat

SEQ ID NO: 6957 - DNA, 24 bp, Equine foamy virus
ttttaagattttatttttcataca

SEQ ID NO: 6958 - DNA, 20 bp, Homo sapiens
tttaaaacatttttcataca

SEQ ID NO: 6959 - DNA, 66 bp, Equine foamy virus
ggattatggggctagctcagctcgctaatgcataatagcattcaactgacagcaaccccatagtct

SEQ ID NO: 6960 - DNA, 24 bp, Equine foamy virus
tagctcagctcgctaatgcataat

SEQ ID NO: 6961 - DNA, 24 bp, Equine foamy virus
ttcaactgacagcaaccccatagt

SEQ ID NO: 6962 - DNA, 21 bp, Homo sapiens
gcttatttcacttcgcataat

SEQ ID NO: 6963 - DNA, 21 bp, Homo sapiens
gctcagcttgttaattctaat

SEQ ID NO: 6964 - DNA, 64 bp, Equine foamy virus
ggagccgggaggatagctcaacctgttaagaactcagaaggttatgtatattcttccttgctcc

SEQ ID NO: 6965 - DNA, 23 bp, Equine foamy virus
ttatgtatattcttccttgctcc

SEQ ID NO: 6966 - DNA, 24 bp, Equine foamy virus
gggaggatagctcaacctgttaag

SEQ ID NO: 6967 - DNA, 16 bp, Homo sapiens
atgcacttccttgctc

SEQ ID NO: 6968 - DNA, 20 bp, Homo sapiens
ctatgtactcttcttgttcc

SEQ ID NO: 6969 - DNA, 20 bp, Homo sapiens
tcatgtatatcttccttgct

SEQ ID NO: 6970 - DNA, 18 bp, Homo sapiens
ttatctaagctccttgct

SEQ ID NO: 6971 - DNA, 20 bp, Homo sapiens
ttatgtatttctcttttgct

SEQ ID NO: 6972 - DNA, 19 bp, Homo sapiens
atgagaattcttccttgct

SEQ ID NO: 6973 - DNA, 21 bp, Homo sapiens
ttatgtattttttccttcctt

SEQ ID NO: 6974 - DNA, 20 bp, Homo sapiens
aggaggatggcttaaggcta

SEQ ID NO: 6975 - DNA, 20 bp, Homo sapiens
gggaggacagcttgagcctg

SEQ ID NO: 6976 - DNA, 20 bp, Homo sapiens
gggaggatcgcttgagccca

SEQ ID NO: 6977 - DNA, 20 bp, Homo sapiens
gggaggattgcttgagcctg

SEQ ID NO: 6978 - DNA, 20 bp, Homo sapiens
ggaaggatggcttgagccca

SEQ ID NO: 6979 - DNA, 20 bp, Homo sapiens
gggaggattgcttgagccca

SEQ ID NO: 6980 - DNA, 21 bp, Homo sapiens
gggaggatgccttgagccaag

SEQ ID NO: 6981 - DNA, 19 bp, Homo sapiens
ggaaggatggttcatgtgt

SEQ ID NO: 6982 - DNA, 20 bp, Homo sapiens
gggaggatggctggtggcca

SEQ ID NO: 6983 - DNA, 20 bp, Homo sapiens
gggaggatgccttgagccca

SEQ ID NO: 6984 - DNA, 20 bp, Homo sapiens
gggaggatggcttgagccca

SEQ ID NO: 6985 - DNA, 20 bp, Homo sapiens
gggaggatggcttgatccta

SEQ ID NO: 6986 - DNA, 22 bp, Homo sapiens
gggaggatcgcttgagatcaag

SEQ ID NO: 6987 - DNA, 20 bp, Homo sapiens
gggagaatagtttgaacccg

SEQ ID NO: 6988 - DNA, 102 bp, Equine foamy virus
taaaatataaataagatcagattgtgagggccactcactcacatattcggctgcgtccggagtgagtcgagcaggccacagactgggtaagaatatatttta

SEQ ID NO: 6989 - DNA, 24 bp, Equine foamy virus
tgagtcgagcaggccacagactgg

SEQ ID NO: 6990 - DNA, 24 bp, Equine foamy virus
actcactcacatattcggctgcgt

SEQ ID NO: 6991 - DNA, 25 bp, Homo sapiens
tgggtcgggcgagctggggggctgg

SEQ ID NO: 6992 - DNA, 23 bp, Homo sapiens
tgagtcgaggggtagccgattgg

SEQ ID NO: 6993 - DNA, 21 bp, Homo sapiens
tgagtcgagtggtttacacag

SEQ ID NO: 6994 - DNA, 19 bp, Homo sapiens
gagcagggttgcagactgg

SEQ ID NO: 6995 - DNA, 21 bp, Homo sapiens
acatgcttacagaagctgcgt

SEQ ID NO: 6996 - DNA, 22 bp, Homo sapiens
tcacatatatatacaattgcgt

SEQ ID NO: 6997 - DNA, 14 bp, Homo sapiens
cactcacaagctgg

SEQ ID NO: 6998 - DNA, 66 bp, Human herpesvirus 5
tggaccgcatggtgaccgacgtgcgcgaggccgtggcccagcgcgagcggttccaccgcgagtcca

SEQ ID NO: 6999 - DNA, 24 bp, Human herpesvirus 5
ccagcgcgagcggttccaccgcga

SEQ ID NO: 7000 - DNA, 24 bp, Human herpesvirus 5
tgaccgacgtgcgcgaggccgtgg

SEQ ID NO: 7001 - DNA, 16 bp, Homo sapiens
tgcctggcgtggccgt

SEQ ID NO: 7002 - DNA, 19 bp, Homo sapiens
gaccacagcggggctgtgg

SEQ ID NO: 7003 - DNA, 18 bp, Homo sapiens
tgcctgggtgaggccgtg

SEQ ID NO: 7004 - DNA, 102 bp, Human herpesvirus 5
gccatcctgaatccccactggctcccgccgccggggttctacacgggcgagtacgacatgcccgaccccaatgacgggttcctgtgggacgatgtggacagc

SEQ ID NO: 7005 - DNA, 24 bp, Human herpesvirus 5
accccaatgacgggttcctgtggg

SEQ ID NO: 7006 - DNA, 24 bp, Human herpesvirus 5
tggctcccgccgccggggttctac

SEQ ID NO: 7007 - DNA, 18 bp, Homo sapiens
tggctcccgttccggcca

SEQ ID NO: 7008 - DNA, 20 bp, Homo sapiens
tggcttcgccgccacaagct

SEQ ID NO: 7009 - DNA, 18 bp, Homo sapiens
gctcccgctgctccttct

SEQ ID NO: 7010 - DNA, 19 bp, Homo sapiens
ggctcccgccgcctcttgc

SEQ ID NO: 7011 - DNA, 18 bp, Homo sapiens
tgcctcccgccgccgcta

SEQ ID NO: 7012 - DNA, 20 bp, Homo sapiens
tgggtcccgccgctggcggc

SEQ ID NO: 7013 - DNA, 19 bp, Homo sapiens
gctcccgccgccgcatccc

SEQ ID NO: 7014 - DNA, 19 bp, Homo sapiens
tggctcccgcccgccggag

SEQ ID NO: 7015 - DNA, 19 bp, Homo sapiens
tggctcccgccgccgcagc

SEQ ID NO: 7016 - DNA, 19 bp, Homo sapiens
tggctcccgtggggcttct

SEQ ID NO: 7017 - DNA, 14 bp, Homo sapiens
gctcccggggttct

SEQ ID NO: 7018 - DNA, 16 bp, Homo sapiens
tggctcccgcagtcct

SEQ ID NO: 7019 - DNA, 23 bp, Homo sapiens
tggcttttggcttctaggttcta

SEQ ID NO: 7020 - DNA, 78 bp, Zaire Ebola virus
gcgtatcccacctttgaaagcacctcctaacgaaagacctaattgggaaaggttaaacgaaggacaaagacgatacgc

SEQ ID NO: 7021 - DNA, 24 bp, Zaire Ebola virus
cacctttgaaagcacctcctaacg

SEQ ID NO: 7022 - DNA, 24 bp, Zaire Ebola virus
ggaaaggttaaacgaaggacaaag

SEQ ID NO: 7023 - DNA, 19 bp, Homo sapiens
ggaaaggttaagcgtcgaa

SEQ ID NO: 7024 - DNA, 18 bp, Homo sapiens
ggagaggaggaggacaaa

SEQ ID NO: 7025 - DNA, 24 bp, Homo sapiens
ggaaagggtacacctaggacaaag

SEQ ID NO: 7026 - DNA, 19 bp, Homo sapiens
ggaaaggttggcgatcagg

SEQ ID NO: 7027 - DNA, 19 bp, Homo sapiens
ggaaaggctccacggggca

SEQ ID NO: 7028 - DNA, 19 bp, Homo sapiens
ggaaaaacgaagggcaaag

SEQ ID NO: 7029 - DNA, 18 bp, Homo sapiens
ggaaaggttgggtgaagg

SEQ ID NO: 7030 - DNA, 18 bp, Homo sapiens
gggaggttggcagacaaa

SEQ ID NO: 7031 - DNA, 24 bp, Homo sapiens
ggaaaggttgcaacatcaccaagg

SEQ ID NO: 7032 - DNA, 21 bp, Homo sapiens
ggaagcgggggagggacaaag

SEQ ID NO: 7033 - DNA, 20 bp, Homo sapiens
ggaaaagttgaacgggtcca

SEQ ID NO: 7034 - DNA, 17 bp, Homo sapiens
ggaaaggtgactggaca

SEQ ID NO: 7035 - DNA, 18 bp, Homo sapiens
ggagaggtgagaaagaca

SEQ ID NO: 7036 - DNA, 25 bp, Homo sapiens
ggaaaggttcaaagtccccacaaag

SEQ ID NO: 7037 - DNA, 18 bp, Homo sapiens
ggaaaggtggaacagcac

SEQ ID NO: 7038 - DNA, 22 bp, Homo sapiens
ggaaaggtgaaacagcatgagg

SEQ ID NO: 7039 - DNA, 18 bp, Homo sapiens
ggaaaggtttgggcggga

SEQ ID NO: 7040 - DNA, 21 bp, Homo sapiens
ggaaagttcatgaggacaaag

SEQ ID NO: 7041 - DNA, 19 bp, Homo sapiens
ggaaaagttggaccttgga

SEQ ID NO: 7042 - DNA, 18 bp, Homo sapiens
ggagaggctgaagacaaa

SEQ ID NO: 7043 - DNA, 17 bp, Homo sapiens
ggaaagttaaattaagg

SEQ ID NO: 7044 - DNA, 21 bp, Homo sapiens
ggagggggtgaggaaggacaa

SEQ ID NO: 7045 - DNA, 20 bp, Homo sapiens
gggggtactgggggacaaag

SEQ ID NO: 7046 - DNA, 19 bp, Homo sapiens
ggaaaggtgagaaagagac

SEQ ID NO: 7047 - DNA, 18 bp, Homo sapiens
gggaaggttgtggacaaa

SEQ ID NO: 7048 - DNA, 23 bp, Homo sapiens
ggaggggtgtcagagggacaaag

SEQ ID NO: 7049 - DNA, 19 bp, Homo sapiens
ggcaaaggagtgaaggaca

SEQ ID NO: 7050 - DNA, 109 bp, Zaire Ebola virus
tatttcagaacaacaatctgctcccactgctcctatcgaacatccggttaataacgcagacgatagtgacgacgaagtaggtgggcctatagaagtacaagccgaagta

SEQ ID NO: 7051 - DNA, 24 bp, Zaire Ebola virus
agacgatagtgacgacgaagtagg

SEQ ID NO: 7052 - DNA, 24 bp, Zaire Ebola virus
tcccactgctcctatcgaacatcc

SEQ ID NO: 7053 - DNA, 23 bp, Homo sapiens
ccctattgcttctaagtcaacat

SEQ ID NO: 7054 - DNA, 16 bp, Homo sapiens
ctgctccttcttcatc

SEQ ID NO: 7055 - DNA, 19 bp, Homo sapiens
tcccactgttgcctattaa

SEQ ID NO: 7056 - DNA, 19 bp, Homo sapiens
tcccactgcctggagcatc

SEQ ID NO: 7057 - DNA, 20 bp, Homo sapiens
ccccactgttctccgatatc

SEQ ID NO: 7058 - DNA, 20 bp, Homo sapiens
cactgctcctatcccactcc

SEQ ID NO: 7059 - DNA, 18 bp, Homo sapiens
tcccactgactttaacat

SEQ ID NO: 7060 - DNA, 65 bp, Zaire Ebola virus
atttcacgtggcttagaatcgaatacttggactgacgtatttatgactacacctttagctgaaat

SEQ ID NO: 7061 - DNA, 22 bp, Zaire Ebola virus
tgactacacctttagctgaaat

SEQ ID NO: 7062 - DNA, 24 bp, Zaire Ebola virus
ttcacgtggcttagaatcgaatac

SEQ ID NO: 7063 - DNA, 22 bp, Homo sapiens
cacacagcttagagtcggatac

SEQ ID NO: 7064 - DNA, 15 bp, Homo sapiens
gtggcttagtaaata

SEQ ID NO: 7065 - DNA, 98 bp, Zaire Ebola virus
tgctaaactaatgatgaagattaatgcggaggtctgataagaataaaccttattattcagattaggccccaagaggcattcttcatctccttttagca

SEQ ID NO: 7066 - DNA, 24 bp, Zaire Ebola virus
atgaagattaatgcggaggtctga

SEQ ID NO: 7067 - DNA, 24 bp, Zaire Ebola virus
ttcagattaggccccaagaggcat

SEQ ID NO: 7068 - DNA, 20 bp, Homo sapiens
taaggattaatgcaaatctg

SEQ ID NO: 7069 - DNA, 18 bp, Homo sapiens
tgaagattgatgttgggc

SEQ ID NO: 7070 - DNA, 18 bp, Homo sapiens
atgaagattaatgtggtc

SEQ ID NO: 7071 - DNA, 22 bp, Homo sapiens
atgagcattgagaggaggtctg

SEQ ID NO: 7072 - DNA, 19 bp, Homo sapiens
ttcaggttggggcctgaga

SEQ ID NO: 7073 - DNA, 19 bp, Homo sapiens
ttcagattaaactaagagg

SEQ ID NO: 7074 - DNA, 20 bp, Homo sapiens
ttcagatctgggctcttcca

SEQ ID NO: 7075 - DNA, 20 bp, Homo sapiens
tccagggcttcgagaggcat

SEQ ID NO: 7076 - DNA, 69 bp, Zaire Ebola virus
acaagtataccttctacttctattgataatcagtttactgatactcaatgttattgggaagttatttgt

SEQ ID NO: 7077 - DNA, 24 bp, Zaire Ebola virus
taccttctacttctattgataatc

SEQ ID NO: 7078 - DNA, 24 bp, Zaire Ebola virus
tactcaatgttattgggaagttat

SEQ ID NO: 7079 - DNA, 19 bp, Homo sapiens
ccaggtgctgggaagttat

SEQ ID NO: 7080 - DNA, 66 bp, Fowlpox virus
gctgcgtttatgggtggaggtctcctgtctggattaggacaggggattggcgcttatgcacaaggc

SEQ ID NO: 7081 - DNA, 24 bp, Fowlpox virus
tttatgggtggaggtctcctgtct

SEQ ID NO: 7082 - DNA, 24 bp, Fowlpox virus
ggggattggcgcttatgcacaagg

SEQ ID NO: 7083 - DNA, 18 bp, Homo sapiens
ggggcttggcgccgacag

SEQ ID NO: 7084 - DNA, 16 bp, Homo sapiens
ggggattgggctacaa

SEQ ID NO: 7085 - DNA, 20 bp, Homo sapiens
ggggtaggtgaggcacaagg

SEQ ID NO: 7086 - DNA, 16 bp, Homo sapiens
ggggatggcgcttggc

SEQ ID NO: 7087 - DNA, 18 bp, Homo sapiens
ggggtaggcaagtatgag

SEQ ID NO: 7088 - DNA, 81 bp, Fowlpox virus
ctattattctaaactaaaataaccatttatacttttattccataacgtagtatatagatttattttattcttttataatgg

SEQ ID NO: 7089 - DNA, 24 bp, Fowlpox virus
actaaaataaccatttatactttt

SEQ ID NO: 7090 - DNA, 24 bp, Fowlpox virus
tagatttattttattcttttataa

SEQ ID NO: 7091 - DNA, 21 bp, Homo sapiens
actaaaatagtctatactttt

SEQ ID NO: 7092 - DNA, 22 bp, Homo sapiens
taaaatattcatttatactttt

SEQ ID NO: 7093 - DNA, 21 bp, Homo sapiens
tagatttatttcatttatcta

SEQ ID NO: 7094 - DNA, 19 bp, Homo sapiens
gaattttattcttttataa

SEQ ID NO: 7095 - DNA, 125 bp, Peanut chlorotic streak virus
gagctctcgataaaaaagtttttctataactcgagctctcgataaaaaagtttttcgaaatctcgataaaaactttttctataactcgagctctcgataaaaaactttttctataactcgagctc

SEQ ID NO: 7096 - DNA, 24 bp, Peanut chlorotic streak virus
gataaaaaagtttttcgaaatctc

SEQ ID NO: 7097 - DNA, 24 bp, Peanut chlorotic streak virus
taactcgagctctcgataaaaaac

SEQ ID NO: 7098 - DNA, 23 bp, Homo sapiens
aataaaaaagtccccaaagtctc

SEQ ID NO: 7099 - DNA, 22 bp, Homo sapiens
taactttagctcttataaaaaa

SEQ ID NO: 7100 - DNA, 19 bp, Homo sapiens
aacttgagcaagataaaaa

SEQ ID NO: 7101 - DNA, 129 bp, Peanut chlorotic streak virus
aaaagcttttcgaaatctcgataaaaactttttctataactcgagctctcgataaaaaagtttttctaacattcgagctctcgataaaaaagtttttctataactcgagctctcgataaaaaagttttt

SEQ ID NO: 7102 - DNA, 24 bp, Peanut chlorotic streak virus
aagcttttcgaaatctcgataaaa

SEQ ID NO: 7103 - DNA, 24 bp, Peanut chlorotic streak virus
taaaaaagtttttctataactcga

SEQ ID NO: 7104 - DNA, 17 bp, Homo sapiens
agctttccgatcaagac

SEQ ID NO: 7105 - DNA, 19 bp, Homo sapiens
agctcttcgggagtctaga

SEQ ID NO: 7106 - DNA, 23 bp, Homo sapiens
aaggttttcctattctcgataaa

SEQ ID NO: 7107 - DNA, 126 bp, Peanut chlorotic streak virus
gagctctcgataaaaaagtttttctataactcgagctctcgataaaaaagcttttcgaaatctcgataaaaaagtttttctataactcgagctctcgataaaaaagtttttctataactcgagctc

SEQ ID NO: 7108 - DNA, 24 bp, Peanut chlorotic streak virus
gataaaaaagcttttcgaaatctc

SEQ ID NO: 7109 - DNA, 24 bp, Peanut chlorotic streak virus
taactcgagctctcgataaaaaag

SEQ ID NO: 7110 - DNA, 23 bp, Homo sapiens
taactttagctcttataaaaaag

SEQ ID NO: 7111 - DNA, 21 bp, Homo sapiens
acttaaacagggataaaaaag

SEQ ID NO: 7112 - DNA, 131 bp, Peanut chlorotic streak virus
agtttttctataactcgagctctcgataaaaaagcttttcgaaatctcgagctctcgataaaaagtttttctataactcgagctctcgataaaaaagtttttctataactcgagctctcgataaaaaagct

SEQ ID NO: 7113 - DNA, 24 bp, Peanut chlorotic streak virus
aagcttttcgaaatctcgagctct

SEQ ID NO: 7114 - DNA, 18 bp, Homo sapiens
agcttttcctcttgagct

SEQ ID NO: 7115 - DNA, 18 bp, Homo sapiens
ctccaaatctcgggttct

SEQ ID NO: 7116 - DNA, 15 bp, Homo sapiens
aagcttttcggagct

SEQ ID NO: 7117 - DNA, 17 bp, Homo sapiens
ttttcaaattgagctct

SEQ ID NO: 7118 - DNA, 130 bp, Peanut chlorotic streak virus
gtttttctataactcgagctctcgataaaaaagtttttctataactcgagctctcgataaaaaagtttttctataactcgagctctcgataaaaaagtttttctataactcgagctctcgataaaaaagc

SEQ ID NO: 7119 - DNA, 70 bp, Human herpesvirus 5
gtttcggggattgtgaaccgtggctgagggtgtagatgggacaggaaaaagcgtgtgatctgaccgaggc

SEQ ID NO: 7120 - DNA, 24 bp, Human herpesvirus 5
ggggattgtgaaccgtggctgagg

SEQ ID NO: 7121 - DNA, 24 bp, Human herpesvirus 5
tgggacaggaaaaagcgtgtgatc

SEQ ID NO: 7122 - DNA, 23 bp, Homo sapiens
ggagattgttcatgtggctgagg

SEQ ID NO: 7123 - DNA, 16 bp, Homo sapiens
ggggattgtagccgga

SEQ ID NO: 7124 - DNA, 19 bp, Homo sapiens
ggatgtcttgtggctgagg

SEQ ID NO: 7125 - DNA, 19 bp, Homo sapiens
gggggtgctggtggctgag

SEQ ID NO: 7126 - DNA, 19 bp, Homo sapiens
tgggacagaaaggggtgac

SEQ ID NO: 7127 - DNA, 18 bp, Homo sapiens
tgggacaagagaaagtga

SEQ ID NO: 7128 - DNA, 18 bp, Homo sapiens
tgaggcaggaaaaagtat

SEQ ID NO: 7129 - DNA, 19 bp, Homo sapiens
tgggacaggaagtaggcgc

SEQ ID NO: 7130 - DNA, 19 bp, Homo sapiens
tgggatggaaaaaatgggt

SEQ ID NO: 7131 - DNA, 21 bp, Homo sapiens
tggcacaggaaaaagagacat

SEQ ID NO: 7132 - DNA, 20 bp, Homo sapiens
gggacagggagaagactggt

SEQ ID NO: 7133 - DNA, 22 bp, Homo sapiens
gggacaggaaagggtggtagtg

SEQ ID NO: 7134 - DNA, 18 bp, Homo sapiens
tgggacgaggaggagcgc

SEQ ID NO: 7135 - DNA, 21 bp, Homo sapiens
tgggacaggaaaaggctcagt

SEQ ID NO: 7136 - DNA, 17 bp, Homo sapiens
tgggacagaaaaagtgt

SEQ ID NO: 7137 - DNA, 21 bp, Homo sapiens
tgggacaggaaggcccagatc

SEQ ID NO: 7138 - DNA, 18 bp, Homo sapiens
tggaacaggaaagatgat

SEQ ID NO: 7139 - DNA, 18 bp, Homo sapiens
tggaacaggaaaggtgat

SEQ ID NO: 7140 - DNA, 17 bp, Homo sapiens
tgggacaggaaaggcgt

SEQ ID NO: 7141 - DNA, 14 bp, Homo sapiens
ggacaggaagtgtg

SEQ ID NO: 7142 - DNA, 18 bp, Homo sapiens
tgggacagggggtggtga

SEQ ID NO: 7143 - DNA, 20 bp, Homo sapiens
ggacaggagagagcggagat

SEQ ID NO: 7144 - DNA, 17 bp, Homo sapiens
tgggacaggaaggggtg

SEQ ID NO: 7145 - DNA, 23 bp, Homo sapiens
gggacaggaaaaaggagagaatc

SEQ ID NO: 7146 - DNA, 18 bp, Homo sapiens
tgggacagggaaagaggt

SEQ ID NO: 7147 - DNA, 17 bp, Homo sapiens
tgggacaggggcagatg

SEQ ID NO: 7148 - DNA, 20 bp, Homo sapiens
tgggacagagagaggagcat

SEQ ID NO: 7149 - DNA, 21 bp, Homo sapiens
tggggcatggaagggtagtgt

SEQ ID NO: 7150 - DNA, 18 bp, Homo sapiens
tgggacagaagaggctgt

SEQ ID NO: 7151 - DNA, 130 bp, Human herpesvirus 5
tagtaataattttaatctttgacgcctacagcagtagtaataattttaatgtttaacgcctacaacagtagtaataattttaatgtttaacgcctacagcagtagtaataattttaatgtttaacgccta

SEQ ID NO: 7152 - DNA, 24 bp, Human herpesvirus 5
tctttgacgcctacagcagtagta

SEQ ID NO: 7153 - DNA, 24 bp, Human herpesvirus 5
taataattttaatgtttaacgcct

SEQ ID NO: 7154 - DNA, 22 bp, Homo sapiens
tttgcactttgcagcagtagta

SEQ ID NO: 7155 - DNA, 64 bp, Human herpesvirus 5
gtagtaataattttaatgtttaacgcctacaacagtagtaataattttaatgtttaacgcctac

SEQ ID NO: 7156 - DNA, 24 bp, Human herpesvirus 5
ttaatgtttaacgcctacaacagt

SEQ ID NO: 7157 - DNA, 22 bp, Homo sapiens
ttaatggtgaacctataacagt

SEQ ID NO: 7158 - DNA, 63 bp, Human herpesvirus 5
ggggtgatccggatgcgtggcaagaggcctcgagcttgggcttctcccgcggatggacgttct

SEQ ID NO: 7159 - DNA, 19 bp, Human herpesvirus 5
tcccgcggatggacgttct

SEQ ID NO: 7160 - DNA, 24 bp, Human herpesvirus 5
ggtgatccggatgcgtggcaagag

SEQ ID NO: 7161 - DNA, 17 bp, Homo sapiens
tcccacaactgtgttct

SEQ ID NO: 7162 - DNA, 17 bp, Homo sapiens
tctcacggacatcttct

SEQ ID NO: 7163 - DNA, 19 bp, Homo sapiens
tcccatggacacctgttct

SEQ ID NO: 7164 - DNA, 18 bp, Homo sapiens
tcccgcgggagagcctct

SEQ ID NO: 7165 - DNA, 18 bp, Homo sapiens
tcctgcggggtggattct

SEQ ID NO: 7166 - DNA, 19 bp, Homo sapiens
tctccatcagcgacgttct

SEQ ID NO: 7167 - DNA, 18 bp, Homo sapiens
tcccgcagatgtgccatt

SEQ ID NO: 7168 - DNA, 18 bp, Homo sapiens
ccttaaagtggacgttct

SEQ ID NO: 7169 - DNA, 17 bp, Homo sapiens
cccgcagtggacgttct

SEQ ID NO: 7170 - DNA, 16 bp, Homo sapiens
tcccgcagaacattct

SEQ ID NO: 7171 - DNA, 20 bp, Homo sapiens
ggtctggggagcagcaagag

SEQ ID NO: 7172 - DNA, 22 bp, Homo sapiens
ggtgggctgggatggtggcaag

SEQ ID NO: 7173 - DNA, 16 bp, Homo sapiens
ggcgatccgtggcggg

SEQ ID NO: 7174 - DNA, 18 bp, Homo sapiens
ggtgtcctggtggcaaga

SEQ ID NO: 7175 - DNA, 17 bp, Homo sapiens
ggtgatccgatgcaggg

SEQ ID NO: 7176 - DNA, 16 bp, Homo sapiens
ggtggcctgcgtggca

SEQ ID NO: 7177 - DNA, 80 bp, Human herpesvirus 5
ctacagcagtagtaataattttaatgtttaacgcctacaacagtagtaataattttaatgtttaacgcctacagcagtag

SEQ ID NO: 7178 - DNA, 24 bp, Human herpesvirus 5
cagcagtagtaataattttaatgt

SEQ ID NO: 7179 - DNA, 22 bp, Homo sapiens
agcagtataataatccctgtgt

SEQ ID NO: 7180 - DNA, 20 bp, Homo sapiens
aacagtagttaatttagtgt

SEQ ID NO: 7181 - DNA, 18 bp, Homo sapiens
tagtaatgcattttaatg

SEQ ID NO: 7182 - DNA, 76 bp, Human herpesvirus 5
aaacattaaaatttagctacgcctacagcagtaataatgtttaacgcctacagcagtagtaataattttaatgttt

SEQ ID NO: 7183 - DNA, 24 bp, Human herpesvirus 5
ttaaaatttagctacgcctacagc

SEQ ID NO: 7184 - DNA, 87 bp, Human herpesvirus 5
ggcgaaaaaataattattccggcccgccaaattctgcatcttgtgaaactacaaaatgctttccggcgaaaaaataattattccgcc

SEQ ID NO: 7185 - DNA, 24 bp, Human herpesvirus 5
aaaatgctttccggcgaaaaaata

SEQ ID NO: 7186 - DNA, 24 bp, Human herpesvirus 5
taattattccggcccgccaaattc

SEQ ID NO: 7187 - DNA, 20 bp, Homo sapiens
tgctttccagttgggaaaaa

SEQ ID NO: 7188 - DNA, 19 bp, Homo sapiens
atgctttccgtgacaaaaa

SEQ ID NO: 7189 - DNA, 16 bp, Homo sapiens
aaatgctttctgaaaa

SEQ ID NO: 7190 - DNA, 18 bp, Homo sapiens
aaaacgctttctccaaaa

SEQ ID NO: 7191 - DNA, 16 bp, Homo sapiens
aatgctttcttgaaaa

SEQ ID NO: 7192 - DNA, 18 bp, Homo sapiens
ctttccagactaaaaata

SEQ ID NO: 7193 - DNA, 19 bp, Homo sapiens
aaaatgcttcctacaaaaa

SEQ ID NO: 7194 - DNA, 71 bp, Himetobi P virus
ctttagataaagtagttttttgatatcgaatggtaaagtatttatatcatctatactataatcatctagag

SEQ ID NO: 7195 - DNA, 24 bp, Himetobi P virus
aagtagttttttgatatcgaatgg

SEQ ID NO: 7196 - DNA, 24 bp, Himetobi P virus
tatcatctatactataatcatcta

SEQ ID NO: 7197 - DNA, 18 bp, Homo sapiens
catcatctaaataatcat

SEQ ID NO: 7198 - DNA, 17 bp, Homo sapiens
ccccgttataatcatct

SEQ ID NO: 7199 - DNA, 21 bp, Homo sapiens
tcatttgtacacaaatcatct

SEQ ID NO: 7200 - DNA, 18 bp, Homo sapiens
atcatctatattgaaatc

SEQ ID NO: 7201 - DNA, 23 bp, Homo sapiens
tatcatctatgcttataagacac

SEQ ID NO: 7202 - DNA, 61 bp, Himetobi P virus
tgtatcgttaaaatctgaataaaccgtagctaataggtatacgttaacaggtttcgaaaca

SEQ ID NO: 7203 - DNA, 22 bp, Himetobi P virus
tacgttaacaggtttcgaaaca

SEQ ID NO: 7204 - DNA, 24 bp, Himetobi P virus
taaaatctgaataaaccgtagcta

SEQ ID NO: 7205 - DNA, 17 bp, Homo sapiens
aaatctaaataaacgta

SEQ ID NO: 7206 - DNA, 21 bp, Homo sapiens
taaaatctgtcactgtagcta

SEQ ID NO: 7207 - DNA, 18 bp, Homo sapiens
taaaatctgaatggtcca

SEQ ID NO: 7208 - DNA, 108 bp, Himetobi P virus
ttaaaagggcatataagttttcaagaagaataccttttatgtagttgatagatttatctgtcatacgtttataggtttcttcaagaataatttagataccccttttgg

SEQ ID NO: 7209 - DNA, 24 bp, Himetobi P virus
tataagttttcaagaagaatacct

SEQ ID NO: 7210 - DNA, 24 bp, Himetobi P virus
tcatacgtttataggtttcttcaa

SEQ ID NO: 7211 - DNA, 17 bp, Homo sapiens
taagaaaagaagaatac

SEQ ID NO: 7212 - DNA, 18 bp, Homo sapiens
tacaagttttcaagaacc

SEQ ID NO: 7213 - DNA, 19 bp, Homo sapiens
tataagtttctcaagggaa

SEQ ID NO: 7214 - DNA, 18 bp, Homo sapiens
tcacagcatgggtttctt

SEQ ID NO: 7215 - DNA, 18 bp, Homo sapiens
gtttaggattttcttcaa

SEQ ID NO: 7216 - DNA, 22 bp, Homo sapiens
tcacagtgggtgggtttcttca

SEQ ID NO: 7217 - DNA, 103 bp, Himetobi P virus
ttgtatttggcgcgagtaagcctatgaaaaacttccttctatgctatatgtgtagaaataggaagcagaagtagtagcagcgagaccgccatccgtaatacaa

SEQ ID NO: 7218 - DNA, 24 bp, Himetobi P virus
tatttggcgcgagtaagcctatga

SEQ ID NO: 7219 - DNA, 24 bp, Himetobi P virus
taggaagcagaagtagtagcagcg

SEQ ID NO: 7220 - DNA, 20 bp, Homo sapiens
taggaagcaaagtgcactaa

SEQ ID NO: 7221 - DNA, 21 bp, Homo sapiens
ggaagcagagggtcaccagcg

SEQ ID NO: 7222 - DNA, 20 bp, Homo sapiens
ggaagtcaacggtagcagcg

SEQ ID NO: 7223 - DNA, 16 bp, Homo sapiens
taggaagcagcagggc

SEQ ID NO: 7224 - DNA, 15 bp, Homo sapiens
ggaagcagggtacag

SEQ ID NO: 7225 - DNA, 23 bp, Homo sapiens
ggaagcagacggtgaccttggcg

SEQ ID NO: 7226 - DNA, 20 bp, Homo sapiens
aggaagcaggctcaaggcag

SEQ ID NO: 7227 - DNA, 16 bp, Homo sapiens
gggggcaggcagtagc

SEQ ID NO: 7228 - DNA, 18 bp, Homo sapiens
taggggcagggtggcggc

SEQ ID NO: 7229 - DNA, 18 bp, Homo sapiens
ggagtagcagaacccagt

SEQ ID NO: 7230 - DNA, 24 bp, Homo sapiens
aggaagtagctcccatggtggcag

SEQ ID NO: 7231 - DNA, 17 bp, Homo sapiens
ggaagcagagcttgcag

SEQ ID NO: 7232 - DNA, 68 bp, Human herpesvirus 8
gttgctatggctgctgttcaacggacccgcctctttttgtcgggccgactgttgcctgtacaagcagc

SEQ ID NO: 7233 - DNA, 24 bp, Human herpesvirus 8
tggctgctgttcaacggacccgcc

SEQ ID NO: 7234 - DNA, 24 bp, Human herpesvirus 8
ccgactgttgcctgtacaagcagc

SEQ ID NO: 7235 - DNA, 18 bp, Homo sapiens
tacccgcggcggacccgc

SEQ ID NO: 7236 - DNA, 18 bp, Homo sapiens
ggctgctgtgaggtccgc

SEQ ID NO: 7237 - DNA, 18 bp, Homo sapiens
tggtggctgttcaatgaa

SEQ ID NO: 7238 - DNA, 18 bp, Homo sapiens
tgggctgagcggacccgc

SEQ ID NO: 7239 - DNA, 28 bp, Homo sapiens
tagctgctgttcactgctggcgggtccg

SEQ ID NO: 7240 - DNA, 15 bp, Homo sapiens
tggctgctgtttccg

SEQ ID NO: 7241 - DNA, 19 bp, Homo sapiens
tggtctgccgcggacccgc

SEQ ID NO: 7242 - DNA, 22 bp, Homo sapiens
tggttgcagcgactgggcctgc

SEQ ID NO: 7243 - DNA, 19 bp, Homo sapiens
ggctccgcgacggacccgc

SEQ ID NO: 7244 - DNA, 20 bp, Homo sapiens
tggctgctgctccggactcg

SEQ ID NO: 7245 - DNA, 18 bp, Homo sapiens
tgtaagctgtacaagtag

SEQ ID NO: 7246 - DNA, 20 bp, Homo sapiens
gacctgttgtccacaagcag

SEQ ID NO: 7247 - DNA, 16 bp, Homo sapiens
cgttgttgcctggcag

SEQ ID NO: 7248 - DNA, 21 bp, Homo sapiens
acctctgcctgtgcaggcagc

SEQ ID NO: 7249 - DNA, 23 bp, Homo sapiens
ccgactgctaggctgtgggcagc

SEQ ID NO: 7250 - DNA, 63 bp, Human herpesvirus 8
ctgcttacgttttactttaataaagttaagttttaagttttaacaggaaatgctcttaggcag

SEQ ID NO: 7251 - DNA, 23 bp, Human herpesvirus 8
taacaggaaatgctcttaggcag

SEQ ID NO: 7252 - DNA, 24 bp, Human herpesvirus 8
ttttactttaataaagttaagttt

SEQ ID NO: 7253 - DNA, 17 bp, Homo sapiens
ttttacttaataaagtt

SEQ ID NO: 7254 - DNA, 18 bp, Homo sapiens
ttttactttaaaaaagct

SEQ ID NO: 7255 - DNA, 26 bp, Homo sapiens
ttttactttattaaaatactgagttt

SEQ ID NO: 7256 - DNA, 18 bp, Homo sapiens
ttttacttgaataaagtt

SEQ ID NO: 7257 - DNA, 70 bp, Macaca mulatta rhadinovirus
gacacgctctgggccgcgccgctcctcgtctgccgtgatcaagcggcgcggcgcggacctttcaagtgtt

SEQ ID NO: 7258 - DNA, 24 bp, Macaca mulatta rhadinovirus
gcgcggcgcggacctttcaagtgt

SEQ ID NO: 7259 - DNA, 24 bp, Macaca mulatta rhadinovirus
gggccgcgccgctcctcgtctgcc

SEQ ID NO: 7260 - DNA, 19 bp, Homo sapiens
gggcccgccgctctccgtc

SEQ ID NO: 7261 - DNA, 23 bp, Homo sapiens
gggccgcgtcctcttgcatagcc

SEQ ID NO: 7262 - DNA, 18 bp, Homo sapiens
gggctgcgccgccccgcc

SEQ ID NO: 7263 - DNA, 18 bp, Homo sapiens
gggccgcctgctctggcc

SEQ ID NO: 7264 - DNA, 24 bp, Homo sapiens
gggtcacgccgctcctcaggtgcc

SEQ ID NO: 7265 - DNA, 22 bp, Homo sapiens
gggccgcgctctccttgggggc

SEQ ID NO: 7266 - DNA, 18 bp, Homo sapiens
gggccgcacgtcgtctgc

SEQ ID NO: 7267 - DNA, 22 bp, Homo sapiens
gggccgcgcccgctccccggcc

SEQ ID NO: 7268 - DNA, 23 bp, Homo sapiens
gggccgcgccgccccaccgcgcc

SEQ ID NO: 7269 - DNA, 20 bp, Homo sapiens
gggccgggccgctccccgtc

SEQ ID NO: 7270 - DNA, 18 bp, Homo sapiens
gggccgcgtcgctcgtgc

SEQ ID NO: 7271 - DNA, 20 bp, Homo sapiens
ggcccgcgccgctctctcgc

SEQ ID NO: 7272 - DNA, 18 bp, Homo sapiens
gggccgcgctctcccggt

SEQ ID NO: 7273 - DNA, 21 bp, Homo sapiens
gggccgcgctctctcgcgctg

SEQ ID NO: 7274 - DNA, 21 bp, Homo sapiens
gggttccgccgctcagctgcc

SEQ ID NO: 7275 - DNA, 22 bp, Homo sapiens
gggcgctgggctctcgtctgcc

SEQ ID NO: 7276 - DNA, 19 bp, Homo sapiens
gggctgttccgctcctgcc

SEQ ID NO: 7277 - DNA, 17 bp, Homo sapiens
ggccgcgccgctgctgc

SEQ ID NO: 7278 - DNA, 16 bp, Homo sapiens
gggccgcgccgtgctg

SEQ ID NO: 7279 - DNA, 22 bp, Homo sapiens
gggccgcgccccttgctctgcc

SEQ ID NO: 7280 - DNA, 18 bp, Homo sapiens
gggccgcggcgctgctgc

SEQ ID NO: 7281 - DNA, 20 bp, Homo sapiens
gcgccgtgggctcgtctgcc

SEQ ID NO: 7282 - DNA, 21 bp, Homo sapiens
gggccgcgaccgctttcccgc

SEQ ID NO: 7283 - DNA, 23 bp, Homo sapiens
gggctgtgctgatcccgcgggcc

SEQ ID NO: 7284 - DNA, 104 bp, Macaca mulatta rhadinovirus
gtggatcctttaccgctcatatggcttctgttttacggttcccggtcgttctgtcgggaaccagagtgcctatatgaacgcaattttggtatgaagggacccat

SEQ ID NO: 7285 - DNA, 24 bp, Macaca mulatta rhadinovirus
tcctttaccgctcatatggcttct

SEQ ID NO: 7286 - DNA, 24 bp, Macaca mulatta rhadinovirus
gaaccagagtgcctatatgaacgc

SEQ ID NO: 7287 - DNA, 23 bp, Homo sapiens
tcctatgtaaaaatatggcttct

SEQ ID NO: 7288 - DNA, 21 bp, Homo sapiens
cttttaactgtgctggcttct

SEQ ID NO: 7289 - DNA, 24 bp, Homo sapiens
tcctttgttttgatggtggcttct

SEQ ID NO: 7290 - DNA, 22 bp, Homo sapiens
tcctttacagcttgtgacacct

SEQ ID NO: 7291 - DNA, 20 bp, Homo sapiens
ccacagcttgtatggtttct

SEQ ID NO: 7292 - DNA, 21 bp, Homo sapiens
tccttgctgctgatggcttct

SEQ ID NO: 7293 - DNA, 17 bp, Homo sapiens
gagccagagtggcatga

SEQ ID NO: 7294 - DNA, 18 bp, Homo sapiens
accagagtgacatactga

SEQ ID NO: 7295 - DNA, 18 bp, Homo sapiens
gaaccaaagtgctaagtg

SEQ ID NO: 7296 - DNA, 129 bp, Macaca mulatta rhadinovirus
gagttcggcgtcgcgcgcgcccaggctcatggagtcctcgcgccgcgaggcgtagcgcgtgagcaggtcgcgcagttcgcgcacgcgattctcccaggtctggttaagcgtgcgcaggtcctggatctc

SEQ ID NO: 7297 - DNA, 24 bp, Macaca mulatta rhadinovirus
gtcgcgcagttcgcgcacgcgatt

SEQ ID NO: 7298 - DNA, 24 bp, Macaca mulatta rhadinovirus
atggagtcctcgcgccgcgaggcg

SEQ ID NO: 7299 - DNA, 17 bp, Homo sapiens
ggggctgcgccgcgagg

SEQ ID NO: 7300 - DNA, 24 bp, Homo sapiens
atggagtctcgcgctgtccgcctg

SEQ ID NO: 7301 - DNA, 19 bp, Homo sapiens
cggagagcgccgcggggcg

SEQ ID NO: 7302 - DNA, 77 bp, Macaca mulatta rhadinovirus
gcgtggtgaacagcagcttgtcgcgctcataagccagcggttcggccgccacgtacaagcggatgtgcttgccgcgc

SEQ ID NO: 7303 - DNA, 24 bp, Macaca mulatta rhadinovirus
tgaacagcagcttgtcgcgctcat

SEQ ID NO: 7304 - DNA, 24 bp, Macaca mulatta rhadinovirus
gcggttcggccgccacgtacaagc

SEQ ID NO: 7305 - DNA, 19 bp, Homo sapiens
tgattagcagcttatttca

SEQ ID NO: 7306 - DNA, 20 bp, Homo sapiens
gaacagcaggccggtgtgct

SEQ ID NO: 7307 - DNA, 18 bp, Homo sapiens
gcggttccggccgccaca

SEQ ID NO: 7308 - DNA, 23 bp, Homo sapiens
ggttcggccgccgccgccgaggc

SEQ ID NO: 7309 - DNA, 18 bp, Homo sapiens
ggttcggccctcccaggc

SEQ ID NO: 7310 - DNA, 78 bp, Macaca mulatta rhadinovirus
ttcctcgaattcacagggtgccttgttttatctgccgtatggacaggacgaatggaattgggcgctcacgttaaggaa

SEQ ID NO: 7311 - DNA, 24 bp, Macaca mulatta rhadinovirus
gtgccttgttttatctgccgtatg

SEQ ID NO: 7312 - DNA, 24 bp, Macaca mulatta rhadinovirus
cgaatggaattgggcgctcacgtt

SEQ ID NO: 7313 - DNA, 23 bp, Homo sapiens
gtgccttgtttctgtgctgctgt

SEQ ID NO: 7314 - DNA, 67 bp, Macaca mulatta rhadinovirus
tgcgcctccagccgctccgagcgcaccttcttgaagacgcgtacctcgggcgcgttggctacgcgca

SEQ ID NO: 7315 - DNA, 24 bp, Macaca mulatta rhadinovirus
acgcgtacctcgggcgcgttggct

SEQ ID NO: 7316 - DNA, 24 bp, Macaca mulatta rhadinovirus
cctccagccgctccgagcgcacct

SEQ ID NO: 7317 - DNA, 19 bp, Homo sapiens
acgtctgcctcgggcgcat

SEQ ID NO: 7318 - DNA, 18 bp, Homo sapiens
cgcgcgcctcgggccggc

SEQ ID NO: 7319 - DNA, 17 bp, Homo sapiens
ctccagccgcccacccg

SEQ ID NO: 7320 - DNA, 19 bp, Homo sapiens
cctccaactgctctataac

SEQ ID NO: 7321 - DNA, 16 bp, Homo sapiens
cctccagctcctccac

SEQ ID NO: 7322 - DNA, 18 bp, Homo sapiens
cctccagccgctccggac

SEQ ID NO: 7323 - DNA, 20 bp, Homo sapiens
ctccagccttccccttacct

SEQ ID NO: 7324 - DNA, 20 bp, Homo sapiens
cctccagctcctcccacagc

SEQ ID NO: 7325 - DNA, 21 bp, Homo sapiens
cctccagcttctgctcagtgc

SEQ ID NO: 7326 - DNA, 17 bp, Homo sapiens
cctccagccaccctgcg

SEQ ID NO: 7327 - DNA, 23 bp, Homo sapiens
cctccagctttctccccttacct

SEQ ID NO: 7328 - DNA, 17 bp, Homo sapiens
ctcaggccaagcgcgcc

SEQ ID NO: 7329 - DNA, 18 bp, Homo sapiens
ctccagccgccctccagc

SEQ ID NO: 7330 - DNA, 18 bp, Homo sapiens
ccccagttgcttcataca

SEQ ID NO: 7331 - DNA, 15 bp, Homo sapiens
ccccagctgctccac

SEQ ID NO: 7332 - DNA, 18 bp, Homo sapiens
ctccagccgccgccgcgc

SEQ ID NO: 7333 - DNA, 16 bp, Homo sapiens
ctccagccctaggcgc

SEQ ID NO: 7334 - DNA, 24 bp, Homo sapiens
ctctggttcctccgagcgcacgct

SEQ ID NO: 7335 - DNA, 21 bp, Homo sapiens
cctccagctgtccagccacct

SEQ ID NO: 7336 - DNA, 80 bp, Macaca mulatta rhadinovirus
cgctcggcttggtcttcacgtccagcagcggtaccagtcccaccgttacgcaccaatccacgtagagaccatagtcgtcg

SEQ ID NO: 7337 - DNA, 24 bp, Macaca mulatta rhadinovirus
tacgcaccaatccacgtagagacc

SEQ ID NO: 7338 - DNA, 24 bp, Macaca mulatta rhadinovirus
tcacgtccagcagcggtaccagtc

SEQ ID NO: 7339 - DNA, 22 bp, Homo sapiens
tactgtcaatccacaaaaggcc

SEQ ID NO: 7340 - DNA, 17 bp, Homo sapiens
cgtcccaatccagagac

SEQ ID NO: 7341 - DNA, 18 bp, Homo sapiens
gccaccaacagtagagac

SEQ ID NO: 7342 - DNA, 18 bp, Homo sapiens
gcaccaatccacacctga

SEQ ID NO: 7343 - DNA, 24 bp, Homo sapiens
taccactatttgggtgtagagacc

SEQ ID NO: 7344 - DNA, 19 bp, Homo sapiens
cgttcccgaggtaccagtc

SEQ ID NO: 7345 - DNA, 19 bp, Homo sapiens
tcattttcagcacaccagt

SEQ ID NO: 7346 - DNA, 18 bp, Homo sapiens
tcagtccagcagctgggt

SEQ ID NO: 7347 - DNA, 22 bp, Homo sapiens
cgcctccagcagcgcgcgggtc

SEQ ID NO: 7348 - DNA, 17 bp, Homo sapiens
gcccagcaaacctggtc

SEQ ID NO: 7349 - DNA, 26 bp, Homo sapiens
tcacgtccagctgggagtgctcagtc

SEQ ID NO: 7350 - DNA, 79 bp, Cocksfoot mottle virus
tcctcaacagcagggaccaccaccaaaccgagggcctgatcaaggacctcggccaggaggcaatcccagaggaggagga

SEQ ID NO: 7351 - DNA, 24 bp, Cocksfoot mottle virus
ggccaggaggcaatcccagaggag

SEQ ID NO: 7352 - DNA, 24 bp, Cocksfoot mottle virus
agggaccaccaccaaaccgagggc

SEQ ID NO: 7353 - DNA, 19 bp, Homo sapiens
ggccaggaggaaatctcag

SEQ ID NO: 7354 - DNA, 24 bp, Homo sapiens
ggccagaggcagtcttcagaggag

SEQ ID NO: 7355 - DNA, 24 bp, Homo sapiens
ggccagaagcatccctcccggagg

SEQ ID NO: 7356 - DNA, 18 bp, Homo sapiens
ggccaggaggcgtggagg

SEQ ID NO: 7357 - DNA, 22 bp, Homo sapiens
ggtcagcaggtcagcagaggag

SEQ ID NO: 7358 - DNA, 20 bp, Homo sapiens
ggctggaggcaattccttgg

SEQ ID NO: 7359 - DNA, 20 bp, Homo sapiens
gggaaggcctctcagaggag

SEQ ID NO: 7360 - DNA, 18 bp, Homo sapiens
ggcctggggaccagagga

SEQ ID NO: 7361 - DNA, 19 bp, Homo sapiens
ggccaggaggcagtgtgga

SEQ ID NO: 7362 - DNA, 21 bp, Homo sapiens
ggccaggaaggcacggaggag

SEQ ID NO: 7363 - DNA, 26 bp, Homo sapiens
ggccaggagcatggcggctggaggag

SEQ ID NO: 7364 - DNA, 18 bp, Homo sapiens
gaccgggaggtcagagga

SEQ ID NO: 7365 - DNA, 23 bp, Homo sapiens
ggctggtgggcagggcagaggag

SEQ ID NO: 7366 - DNA, 22 bp, Homo sapiens
ggccaggagaggtacgggggag

SEQ ID NO: 7367 - DNA, 19 bp, Homo sapiens
ggcaggaggcggcagggga

SEQ ID NO: 7368 - DNA, 18 bp, Homo sapiens
ggccaggaggcacattcc

SEQ ID NO: 7369 - DNA, 23 bp, Homo sapiens
ggccggggggctccgcagaggag

SEQ ID NO: 7370 - DNA, 18 bp, Homo sapiens
ggtagggggcagaagagg

SEQ ID NO: 7371 - DNA, 18 bp, Homo sapiens
ggccaggaggctgcaggg

SEQ ID NO: 7372 - DNA, 21 bp, Homo sapiens
ggccaagaggtccaggaggag

SEQ ID NO: 7373 - DNA, 19 bp, Homo sapiens
gctcagggggacccagagg

SEQ ID NO: 7374 - DNA, 19 bp, Homo sapiens
agctgggaggcaatcctgg

SEQ ID NO: 7375 - DNA, 16 bp, Homo sapiens
ggccagagcccagagg

SEQ ID NO: 7376 - DNA, 17 bp, Homo sapiens
ggccaggagaatggagg

SEQ ID NO: 7377 - DNA, 15 bp, Homo sapiens
ggccaggagcagagg

SEQ ID NO: 7378 - DNA, 18 bp, Homo sapiens
ggccagaagggttggagg

SEQ ID NO: 7379 - DNA, 21 bp, Homo sapiens
ggccaagacctcccagaggag

SEQ ID NO: 7380 - DNA, 22 bp, Homo sapiens
ggcctagaggggctcctctggg

SEQ ID NO: 7381 - DNA, 21 bp, Homo sapiens
ggctggtggggcagtgaggag

SEQ ID NO: 7382 - DNA, 25 bp, Homo sapiens
ggccaggaggcactgagcaagggag

SEQ ID NO: 7383 - DNA, 20 bp, Homo sapiens
ggcaggaggcagacagggag

SEQ ID NO: 7384 - DNA, 28 bp, Homo sapiens
ggccagaaggcgatggggctcctctggg

SEQ ID NO: 7385 - DNA, 21 bp, Homo sapiens
ggacagggggccccagaggag

SEQ ID NO: 7386 - DNA, 19 bp, Homo sapiens
ggccaggaggggttcccag

SEQ ID NO: 7387 - DNA, 21 bp, Homo sapiens
ggccaggagggtggggaggag

SEQ ID NO: 7388 - DNA, 16 bp, Homo sapiens
ggctgggagacaaggg

SEQ ID NO: 7389 - DNA, 22 bp, Homo sapiens
ggcaaggaggagcccagaggag

SEQ ID NO: 7390 - DNA, 18 bp, Homo sapiens
ggtcaggaagcggggagg

SEQ ID NO: 7391 - DNA, 14 bp, Homo sapiens
gggccaccaccggg

SEQ ID NO: 7392 - DNA, 23 bp, Homo sapiens
agggaccaccacctgcttggggc

SEQ ID NO: 7393 - DNA, 24 bp, Homo sapiens
agggaccacacactagagtgaggg

SEQ ID NO: 7394 - DNA, 20 bp, Homo sapiens
ggaaccacgggggccggggg

SEQ ID NO: 7395 - DNA, 17 bp, Homo sapiens
gagaccaccatcgagag

SEQ ID NO: 7396 - DNA, 22 bp, Homo sapiens
agggaccactgataagacatgg

SEQ ID NO: 7397 - DNA, 26 bp, Homo sapiens
gggaccactgtcacttttctgagggc

SEQ ID NO: 7398 - DNA, 23 bp, Homo sapiens
ggggccgccatgagcccgagggc

SEQ ID NO: 7399 - DNA, 23 bp, Homo sapiens
ggccattgccaaagactgagggc

SEQ ID NO: 7400 - DNA, 19 bp, Homo sapiens
aggggctggcaccaaacca

SEQ ID NO: 7401 - DNA, 21 bp, Homo sapiens
agggaccagctgtcaaaaggc

SEQ ID NO: 7402 - DNA, 20 bp, Homo sapiens
gggaccactttgaaagtggc

SEQ ID NO: 7403 - DNA, 25 bp, Homo sapiens
gggaggccgaccgagagtcgggggc

SEQ ID NO: 7404 - DNA, 17 bp, Homo sapiens
gggaccaccctccaggg

SEQ ID NO: 7405 - DNA, 21 bp, Homo sapiens
agagaccagggggccgggggc

SEQ ID NO: 7406 - DNA, 22 bp, Homo sapiens
agggatcactcggaccgagggc

SEQ ID NO: 7407 - DNA, 88 bp, Cocksfoot mottle virus
gcgtgtccggtgctccccgatggagatttgaaggaggtgagcttttgctcccatctcatctctaagggtcgagcagagctggagacgt

SEQ ID NO: 7408 - DNA, 24 bp, Cocksfoot mottle virus
tctaagggtcgagcagagctggag

SEQ ID NO: 7409 - DNA, 24 bp, Cocksfoot mottle virus
tgtccggtgctccccgatggagat

SEQ ID NO: 7410 - DNA, 16 bp, Homo sapiens
gggacgtagagctgga

SEQ ID NO: 7411 - DNA, 22 bp, Homo sapiens
ggcatacggagcagagctggag

SEQ ID NO: 7412 - DNA, 19 bp, Homo sapiens
tctgggggcaccagctgga

SEQ ID NO: 7413 - DNA, 14 bp, Homo sapiens
gggtccaggctgga

SEQ ID NO: 7414 - DNA, 15 bp, Homo sapiens
tctggggagagctgg

SEQ ID NO: 7415 - DNA, 19 bp, Homo sapiens
tctagggctttaagctgga

SEQ ID NO: 7416 - DNA, 21 bp, Homo sapiens
cctagaggagcagagttggag

SEQ ID NO: 7417 - DNA, 18 bp, Homo sapiens
gggctggcggagctggag

SEQ ID NO: 7418 - DNA, 23 bp, Homo sapiens
cctgggggcacagggagctggag

SEQ ID NO: 7419 - DNA, 17 bp, Homo sapiens
aagcagcagagctggag

SEQ ID NO: 7420 - DNA, 21 bp, Homo sapiens
caaaggtaatcagagctggag

SEQ ID NO: 7421 - DNA, 19 bp, Homo sapiens
aggccaggcagagctggag

SEQ ID NO: 7422 - DNA, 82 bp, Cocksfoot mottle virus
acccgggatgggtctgtcgaaagctagccaagtcgcgctgttatgggaggatttggcgcgtacgaaccagacccacccgggt

SEQ ID NO: 7423 - DNA, 24 bp, Cocksfoot mottle virus
tcgaaagctagccaagtcgcgctg

SEQ ID NO: 7424 - DNA, 24 bp, Cocksfoot mottle virus
ttggcgcgtacgaaccagacccac

SEQ ID NO: 7425 - DNA, 16 bp, Homo sapiens
tccaaggctgtcgcgc

SEQ ID NO: 7426 - DNA, 22 bp, Homo sapiens
tcgaaagcggccaggcgcggtg

SEQ ID NO: 7427 - DNA, 22 bp, Homo sapiens
ccggggctcccgagtcgcgctg

SEQ ID NO: 7428 - DNA, 14 bp, Homo sapiens
gaaagcagccacgc

SEQ ID NO: 7429 - DNA, 65 bp, Cocksfoot mottle virus
cgttgatggcgaaggcagctatatcgcggttttactgcttgatgaatgctaccttccaattaacg

SEQ ID NO: 7430 - DNA, 24 bp, Cocksfoot mottle virus
gcgaaggcagctatatcgcggttt

SEQ ID NO: 7431 - DNA, 24 bp, Cocksfoot mottle virus
cttgatgaatgctaccttccaatt

SEQ ID NO: 7432 - DNA, 23 bp, Homo sapiens
gaagacagctgtaggcattgttt

SEQ ID NO: 7433 - DNA, 18 bp, Homo sapiens
gcgggggcagctagtcgg

SEQ ID NO: 7434 - DNA, 16 bp, Homo sapiens
aggcggcttccggttt

SEQ ID NO: 7435 - DNA, 24 bp, Homo sapiens
gcggagggcggcgcgccgcggttt

SEQ ID NO: 7436 - DNA, 90 bp, Cocksfoot mottle virus
cctccagctccaactcccgcattcgctgccttatggctgagctcatcggctcgccttggtgtatcgcaatgggagatgattctgttgagg

SEQ ID NO: 7437 - DNA, 24 bp, Cocksfoot mottle virus
ctcgccttggtgtatcgcaatggg

SEQ ID NO: 7438 - DNA, 24 bp, Cocksfoot mottle virus
tccaactcccgcattcgctgcctt

SEQ ID NO: 7439 - DNA, 24 bp, Homo sapiens
ctcgcccttggtgtattgcctaag

SEQ ID NO: 7440 - DNA, 19 bp, Homo sapiens
ctcctcttgggagcaatgg

SEQ ID NO: 7441 - DNA, 19 bp, Homo sapiens
gccttggtggttagcatgg

SEQ ID NO: 7442 - DNA, 15 bp, Homo sapiens
ctctcttgggcaatg

SEQ ID NO: 7443 - DNA, 121 bp, Cocksfoot mottle virus
gccctagtaaccaatgctcagtcacaatttgacctaatgggagatgatatacaacgagcagaaaatttccccagggtcattaacaatctatacactatgctgggtctcaatatacatgggc

SEQ ID NO: 7444 - DNA, 24 bp, Cocksfoot mottle virus
tccccagggtcattaacaatctat

SEQ ID NO: 7445 - DNA, 24 bp, Cocksfoot mottle virus
agtaaccaatgctcagtcacaatt

SEQ ID NO: 7446 - DNA, 24 bp, Homo sapiens
ccccagggtcccagcctgatctat

SEQ ID NO: 7447 - DNA, 16 bp, Homo sapiens
gggtcattcattctat

SEQ ID NO: 7448 - DNA, 19 bp, Homo sapiens
tccccaggtccccaagtct

SEQ ID NO: 7449 - DNA, 18 bp, Homo sapiens
tcctcagggccattatct

SEQ ID NO: 7450 - DNA, 20 bp, Homo sapiens
cccagggtcattcggtccca

SEQ ID NO: 7451 - DNA, 20 bp, Homo sapiens
tccttaaggttattaacaat

SEQ ID NO: 7452 - DNA, 17 bp, Homo sapiens
ccctaggtcactcatct

SEQ ID NO: 7453 - DNA, 19 bp, Homo sapiens
ccaatgtcttctcacaatt

SEQ ID NO: 7454 - DNA, 24 bp, Homo sapiens
agtaaccattgctcccaggctaca

SEQ ID NO: 7455 - DNA, 22 bp, Homo sapiens
agttaccaatgcttcaacaatt

SEQ ID NO: 7456 - DNA, 70 bp, Bovine herpesvirus 4
ggcggccgggggcccgcggcgcgtcaggcgccataggtgccgaccgagtccgcggtccaccatacccgcc

SEQ ID NO: 7457 - DNA, 22 bp, Bovine herpesvirus 4
tccgcggtccaccatacccgcc

SEQ ID NO: 7458 - DNA, 24 bp, Bovine herpesvirus 4
gggggcccgcggcgcgtcaggcgc

SEQ ID NO: 7459 - DNA, 14 bp, Homo sapiens
cccgcccatacccg

SEQ ID NO: 7460 - DNA, 24 bp, Homo sapiens
cctgcaccccccatcatgtctgcc

SEQ ID NO: 7461 - DNA, 21 bp, Homo sapiens
tccgcggcccactcgtgcgcc

SEQ ID NO: 7462 - DNA, 16 bp, Homo sapiens
cgccgccgtacccgcc

SEQ ID NO: 7463 - DNA, 23 bp, Homo sapiens
tccgcggtcaccttctagccgcc

SEQ ID NO: 7464 - DNA, 21 bp, Homo sapiens
ccggctgcctgccatacccgc

SEQ ID NO: 7465 - DNA, 21 bp, Homo sapiens
tcctggtcccctttacccgcc

SEQ ID NO: 7466 - DNA, 19 bp, Homo sapiens
gcgcgtcacaacacccgcc

SEQ ID NO: 7467 - DNA, 17 bp, Homo sapiens
tccgcgctgtacccgcc

SEQ ID NO: 7468 - DNA, 17 bp, Homo sapiens
tcctcggtccacaccgc

SEQ ID NO: 7469 - DNA, 21 bp, Homo sapiens
tccgcggctctgtccggcgcc

SEQ ID NO: 7470 - DNA, 18 bp, Homo sapiens
cccgcggtccgccggcgc

SEQ ID NO: 7471 - DNA, 19 bp, Homo sapiens
tccgcggcgctggcccgcc

SEQ ID NO: 7472 - DNA, 16 bp, Homo sapiens
tccgcggtcccgccgc

SEQ ID NO: 7473 - DNA, 21 bp, Homo sapiens
ggggtcctggctgtcaggcgc

SEQ ID NO: 7474 - DNA, 22 bp, Homo sapiens
gggagccccagccgtcgggcgc

SEQ ID NO: 7475 - DNA, 18 bp, Homo sapiens
gggggctcggactgggcg

SEQ ID NO: 7476 - DNA, 18 bp, Homo sapiens
gggggcccggctgggcgc

SEQ ID NO: 7477 - DNA, 21 bp, Homo sapiens
ggggcccgcgaccccaggcgc

SEQ ID NO: 7478 - DNA, 24 bp, Homo sapiens
gggggcccagcggccaatgggcgc

SEQ ID NO: 7479 - DNA, 22 bp, Homo sapiens
gggggcccggtaccccaggtgc

SEQ ID NO: 7480 - DNA, 18 bp, Homo sapiens
gggggctggcggcgcggc

SEQ ID NO: 7481 - DNA, 18 bp, Homo sapiens
gggggctccgcggaggcg

SEQ ID NO: 7482 - DNA, 15 bp, Homo sapiens
ggggcccgcgggggc

SEQ ID NO: 7483 - DNA, 19 bp, Homo sapiens
gggggcccgggcggcggcg

SEQ ID NO: 7484 - DNA, 97 bp, Bovine herpesvirus 4
cggtgcgtcccggcggacatgctgggcctaccgtggactccatttccgagacgacgtggggggagcggtggttgagcgcgccgccgggtgaacgctg

SEQ ID NO: 7485 - DNA, 24 bp, Bovine herpesvirus 4
acatgctgggcctaccgtggactc

SEQ ID NO: 7486 - DNA, 24 bp, Bovine herpesvirus 4
gagcgcgccgccgggtgaacgctg

SEQ ID NO: 7487 - DNA, 20 bp, Homo sapiens
acatgctgggtgcacctgga

SEQ ID NO: 7488 - DNA, 17 bp, Homo sapiens
catgctgggctatgtag

SEQ ID NO: 7489 - DNA, 19 bp, Homo sapiens
atgctgggtgtttgggctc

SEQ ID NO: 7490 - DNA, 16 bp, Homo sapiens
atgctgggcttacagg

SEQ ID NO: 7491 - DNA, 22 bp, Homo sapiens
acagttgggcctggatgaactc

SEQ ID NO: 7492 - DNA, 23 bp, Homo sapiens
acatgtttcagaactgtggactc

SEQ ID NO: 7493 - DNA, 20 bp, Homo sapiens
tgctgggccgggatggactc

SEQ ID NO: 7494 - DNA, 20 bp, Homo sapiens
acatgctgggattataggct

SEQ ID NO: 7495 - DNA, 22 bp, Homo sapiens
acatgctgggcactgcacactc

SEQ ID NO: 7496 - DNA, 20 bp, Homo sapiens
tgctgggcctgaaggggctc

SEQ ID NO: 7497 - DNA, 15 bp, Homo sapiens
tgctgggcctggcct

SEQ ID NO: 7498 - DNA, 16 bp, Homo sapiens
gctgggcctggtggct

SEQ ID NO: 7499 - DNA, 16 bp, Homo sapiens
tgctgggctcagagct

SEQ ID NO: 7500 - DNA, 15 bp, Homo sapiens
cagctgggcctaaac

SEQ ID NO: 7501 - DNA, 23 bp, Homo sapiens
acgctgggcagcactgtgggctc

SEQ ID NO: 7502 - DNA, 19 bp, Homo sapiens
gagccgccgccgcgccgct

SEQ ID NO: 7503 - DNA, 19 bp, Homo sapiens
gccgccgccgcctctgctg

SEQ ID NO: 7504 - DNA, 21 bp, Homo sapiens
gagcgcgccggtcgggccccg

SEQ ID NO: 7505 - DNA, 16 bp, Homo sapiens
gagcccgccgccgcgc

SEQ ID NO: 7506 - DNA, 17 bp, Homo sapiens
gcgcgccgcgcggcgct

SEQ ID NO: 7507 - DNA, 61 bp, Bovine herpesvirus 4
ggccttatagatctccggatcgatgcggacgggggtaatgatcagggcgatcggaacggcc

SEQ ID NO: 7508 - DNA, 24 bp, Bovine herpesvirus 4
tagatctccggatcgatgcggacg

SEQ ID NO: 7509 - DNA, 20 bp, Bovine herpesvirus 4
tcagggcgatcggaacggcc

SEQ ID NO: 7510 - DNA, 18 bp, Homo sapiens
gcgctccttggaacggcc

SEQ ID NO: 7511 - DNA, 16 bp, Homo sapiens
tcagagcaagaacggc

SEQ ID NO: 7512 - DNA, 19 bp, Homo sapiens
ccagggcgatactctggcc

SEQ ID NO: 7513 - DNA, 18 bp, Homo sapiens
ccagggcaggcggcggcc

SEQ ID NO: 7514 - DNA, 20 bp, Homo sapiens
tcagggcagcgcgagcggcc

SEQ ID NO: 7515 - DNA, 14 bp, Homo sapiens
tcagggcaggcggc

SEQ ID NO: 7516 - DNA, 20 bp, Homo sapiens
tcagggcgcaggcctcggcc

SEQ ID NO: 7517 - DNA, 18 bp, Homo sapiens
ccagggcagcaaatggcc

SEQ ID NO: 7518 - DNA, 18 bp, Homo sapiens
tcaggcgatccacccggc

SEQ ID NO: 7519 - DNA, 17 bp, Homo sapiens
agaggcagcaaatggcc

SEQ ID NO: 7520 - DNA, 18 bp, Homo sapiens
tcagagcaaagagtggcc

SEQ ID NO: 7521 - DNA, 16 bp, Homo sapiens
cagggcgagaggcggc

SEQ ID NO: 7522 - DNA, 20 bp, Homo sapiens
tcagggcagttgcagaggcc

SEQ ID NO: 7523 - DNA, 23 bp, Homo sapiens
tcagggcagacacgccagcggcc

SEQ ID NO: 7524 - DNA, 16 bp, Homo sapiens
tcagagcggcggacgg

SEQ ID NO: 7525 - DNA, 21 bp, Homo sapiens
tcagggcaatgccccgcggcc

SEQ ID NO: 7526 - DNA, 19 bp, Homo sapiens
agggcgacatctggtggcc

SEQ ID NO: 7527 - DNA, 19 bp, Homo sapiens
tcagggcatcgactgaggc

SEQ ID NO: 7528 - DNA, 16 bp, Homo sapiens
tcaggacggaactggc

SEQ ID NO: 7529 - DNA, 18 bp, Homo sapiens
gaggagtcggggaacggc

SEQ ID NO: 7530 - DNA, 18 bp, Homo sapiens
tcagggcaggctttggcc

SEQ ID NO: 7531 - DNA, 14 bp, Homo sapiens
tcagggcgggacgg

SEQ ID NO: 7532 - DNA, 17 bp, Homo sapiens
tcagggcagaggatggc

SEQ ID NO: 7533 - DNA, 17 bp, Homo sapiens
tcaggacgccgatggcc

SEQ ID NO: 7534 - DNA, 19 bp, Homo sapiens
tcagagcaggacaacggcc

SEQ ID NO: 7535 - DNA, 15 bp, Homo sapiens
tcagggcgacctggc

SEQ ID NO: 7536 - DNA, 18 bp, Homo sapiens
tcaggcgatccacctgcc

SEQ ID NO: 7537 - DNA, 14 bp, Homo sapiens
tcagggcgcgcggc

SEQ ID NO: 7538 - DNA, 24 bp, Homo sapiens
ccagggcggctggcaggggcggcc

SEQ ID NO: 7539 - DNA, 18 bp, Homo sapiens
tcagggcatctgcgggcc

SEQ ID NO: 7540 - DNA, 15 bp, Homo sapiens
ccagggcgcagtggc

SEQ ID NO: 7541 - DNA, 20 bp, Homo sapiens
ccagggcgcagaccgtggcc

SEQ ID NO: 7542 - DNA, 19 bp, Homo sapiens
tcgtggcgacgactcggcc

SEQ ID NO: 7543 - DNA, 15 bp, Homo sapiens
tcagagcaccaatgg

SEQ ID NO: 7544 - DNA, 15 bp, Homo sapiens
ccagggcgtggcggc

SEQ ID NO: 7545 - DNA, 17 bp, Homo sapiens
tcggggcgaccgcggcc

SEQ ID NO: 7546 - DNA, 116 bp, Bovine herpesvirus 4
ggggcagtcggggaagtggctgtcgagcacgtagccctgcaccaagatctgcttaaagttcgggtgacgggggttcgcgaagacgggctcgcggcggaccagatccccggagctcc

SEQ ID NO: 7547 - DNA, 24 bp, Bovine herpesvirus 4
tgacgggggttcgcgaagacgggc

SEQ ID NO: 7548 - DNA, 24 bp, Bovine herpesvirus 4
agtcggggaagtggctgtcgagca

SEQ ID NO: 7549 - DNA, 19 bp, Homo sapiens
ggtgagcgcggagacgggc

SEQ ID NO: 7550 - DNA, 19 bp, Homo sapiens
tgacgggggcggaggtggg

SEQ ID NO: 7551 - DNA, 18 bp, Homo sapiens
gggggagaagaggtgggc

SEQ ID NO: 7552 - DNA, 18 bp, Homo sapiens
tgctggggtcctggaggg

SEQ ID NO: 7553 - DNA, 18 bp, Homo sapiens
ggaggggcgggagacggg

SEQ ID NO: 7554 - DNA, 16 bp, Homo sapiens
cgggggctaaggcggg

SEQ ID NO: 7555 - DNA, 18 bp, Homo sapiens
gtcgggggatggcgggcg

SEQ ID NO: 7556 - DNA, 20 bp, Homo sapiens
agttggggagctgggcaggt

SEQ ID NO: 7557 - DNA, 16 bp, Homo sapiens
agtcggggggtggtgt

SEQ ID NO: 7558 - DNA, 20 bp, Homo sapiens
gtcagggaggtggcaggggc

SEQ ID NO: 7559 - DNA, 20 bp, Homo sapiens
gtcggggagtgggggaaagc

SEQ ID NO: 7560 - DNA, 21 bp, Homo sapiens
agtcggggagagtgggaagca

SEQ ID NO: 7561 - DNA, 17 bp, Homo sapiens
agtcggggggatggggc

SEQ ID NO: 7562 - DNA, 21 bp, Homo sapiens
agttgagggggtgggtgggca

SEQ ID NO: 7563 - DNA, 61 bp, Bovine herpesvirus 4
tttttaccttttgaagagcagcgcttaaagcgggcactagagctgttagaagaagtagaaa

SEQ ID NO: 7564 - DNA, 24 bp, Bovine herpesvirus 4
taccttttgaagagcagcgcttaa

SEQ ID NO: 7565 - DNA, 24 bp, Bovine herpesvirus 4
cactagagctgttagaagaagtag

SEQ ID NO: 7566 - DNA, 21 bp, Homo sapiens
ccgagcagagagcagcgctta

SEQ ID NO: 7567 - DNA, 14 bp, Homo sapiens
ttttgaagaggctt

SEQ ID NO: 7568 - DNA, 16 bp, Homo sapiens
tacctttttaggcagc

SEQ ID NO: 7569 - DNA, 90 bp, Murid herpesvirus 4
atataagggcacttctactgatgataggcaaaatgtatcatttgaccctaaacagctacaaatgtttattataggctgtgctccctgtat

SEQ ID NO: 7570 - DNA, 24 bp, Murid herpesvirus 4
aagggcacttctactgatgatagg

SEQ ID NO: 7571 - DNA, 19 bp, Murid herpesvirus 4
taggctgtgctccctgtat

SEQ ID NO: 7572 - DNA, 21 bp, Homo sapiens
aagggcactgtttaaagtagg

SEQ ID NO: 7573 - DNA, 23 bp, Homo sapiens
aagtgcacttttagaacaatagg

SEQ ID NO: 7574 - DNA, 18 bp, Homo sapiens
gggtgtggttccctgtat

SEQ ID NO: 7575 - DNA, 20 bp, Homo sapiens
ggctgtgctcagaactgtat

SEQ ID NO: 7576 - DNA, 16 bp, Homo sapiens
taggctgctgctgtat

SEQ ID NO: 7577 - DNA, 19 bp, Homo sapiens
aggagtgtgctccctgtat

SEQ ID NO: 7578 - DNA, 17 bp, Homo sapiens
taggcctggccctgtat

SEQ ID NO: 7579 - DNA, 17 bp, Homo sapiens
agactctctccctgtat

SEQ ID NO: 7580 - DNA, 17 bp, Homo sapiens
caggggtgttcctgtat

SEQ ID NO: 7581 - DNA, 16 bp, Homo sapiens
aggctgcagcttgtat

SEQ ID NO: 7582 - DNA, 16 bp, Homo sapiens
agacatttccctgtat

SEQ ID NO: 7583 - DNA, 17 bp, Homo sapiens
cagatgtctccttgtat

SEQ ID NO: 7584 - DNA, 19 bp, Homo sapiens
ggccgccggctccctgtat

SEQ ID NO: 7585 - DNA, 19 bp, Homo sapiens
caggttatctaccctgtat

SEQ ID NO: 7586 - DNA, 23 bp, Homo sapiens
caggctgcctggcctccctgtat

SEQ ID NO: 7587 - DNA, 21 bp, Homo sapiens
caggctgcctggcctccctgt

SEQ ID NO: 7588 - DNA, 73 bp, Murid herpesvirus 4
gcgcgcacaaggtcataacaatggcatatgctggtttaatcagctatttgtcacagtagtagacaacacgcgt

SEQ ID NO: 7589 - DNA, 24 bp, Murid herpesvirus 4
tttgtcacagtagtagacaacacg

SEQ ID NO: 7590 - DNA, 24 bp, Murid herpesvirus 4
taacaatggcatatgctggtttaa

SEQ ID NO: 7591 - DNA, 16 bp, Homo sapiens
tttgccatagtagaca

SEQ ID NO: 7592 - DNA, 19 bp, Homo sapiens
tttgtcacagaagtggaca

SEQ ID NO: 7593 - DNA, 21 bp, Homo sapiens
gtccaagtagtaggtgacacg

SEQ ID NO: 7594 - DNA, 15 bp, Homo sapiens
acaatggcatggcct

SEQ ID NO: 7595 - DNA, 20 bp, Homo sapiens
acaattaaccatgctggttt

SEQ ID NO: 7596 - DNA, 25 bp, Homo sapiens
taacaatgtcatgttccaggtttaa

SEQ ID NO: 7597 - DNA, 19 bp, Homo sapiens
tggcacatggtatgtgctc

SEQ ID NO: 7598 - DNA, 19 bp, Homo sapiens
aatggcttagctggtttaa

SEQ ID NO: 7599 - DNA, 18 bp, Homo sapiens
actgtggcgtgtggctca

SEQ ID NO: 7600 - DNA, 123 bp, Murid herpesvirus 4
acttgtaaatatccagatttcttaaagatgcaaaatgatgtgtatggtgattcctgctttttttatgcaaggcgagagcaatgttatgctagacatttttttgttcgtggaggcaagacaggt

SEQ ID NO: 7601 - DNA, 24 bp, Murid herpesvirus 4
cgagagcaatgttatgctagacat

SEQ ID NO: 7602 - DNA, 24 bp, Murid herpesvirus 4
tgcaaaatgatgtgtatggtgatt

SEQ ID NO: 7603 - DNA, 21 bp, Homo sapiens
cgagagcaatattatatacat

SEQ ID NO: 7604 - DNA, 17 bp, Homo sapiens
gagacaatgttacatta

SEQ ID NO: 7605 - DNA, 17 bp, Homo sapiens
tgcaaggtgtgtgtgtg

SEQ ID NO: 7606 - DNA, 65 bp, Avian infectious bronchitis virus
ggaagaacaaggattatatggaacacgattattataaaataacaatagttcctggttcctcttcc

SEQ ID NO: 7607 - DNA, 24 bp, Avian infectious bronchitis virus
tatggaacacgattattataaaat

SEQ ID NO: 7608 - DNA, 17 bp, Avian infectious bronchitis virus
ttcctggttcctcttcc

SEQ ID NO: 7609 - DNA, 18 bp, Homo sapiens
ttcctggtttctctatcc

SEQ ID NO: 7610 - DNA, 19 bp, Homo sapiens
ttccaccctctcctcttcc

SEQ ID NO: 7611 - DNA, 18 bp, Homo sapiens
tctctttccctctcttcc

SEQ ID NO: 7612 - DNA, 18 bp, Homo sapiens
tcccgacgggcctcttcc

SEQ ID NO: 7613 - DNA, 20 bp, Homo sapiens
tccttgggctgatcctcttc

SEQ ID NO: 7614 - DNA, 19 bp, Homo sapiens
ctcctccttcgcttcttcc

SEQ ID NO: 7615 - DNA, 19 bp, Homo sapiens
tcccctctcctcctcttcc

SEQ ID NO: 7616 - DNA, 19 bp, Homo sapiens
ctcctgctcctcctcttcc

SEQ ID NO: 7617 - DNA, 19 bp, Homo sapiens
ttccttttcctcctcttcc

SEQ ID NO: 7618 - DNA, 19 bp, Homo sapiens
ttcccacagctcctcttcc

SEQ ID NO: 7619 - DNA, 18 bp, Homo sapiens
ctcccaacacccttttcc

SEQ ID NO: 7620 - DNA, 18 bp, Homo sapiens
ctcctggtcattttcttc

SEQ ID NO: 7621 - DNA, 19 bp, Homo sapiens
ctcctgcccctcctcttcc

SEQ ID NO: 7622 - DNA, 23 bp, Homo sapiens
ttcctgtcctcggttcttttccg

SEQ ID NO: 7623 - DNA, 19 bp, Homo sapiens
ttccccactgccctcttcc

SEQ ID NO: 7624 - DNA, 18 bp, Homo sapiens
tcccagttcccttcttcc

SEQ ID NO: 7625 - DNA, 18 bp, Homo sapiens
tcccttcctctctcttcc

SEQ ID NO: 7626 - DNA, 18 bp, Homo sapiens
ctcctaccaccttcttcc

SEQ ID NO: 7627 - DNA, 18 bp, Homo sapiens
ctcctggttcctcttccg

SEQ ID NO: 7628 - DNA, 19 bp, Homo sapiens
ttccgattccacctcttcc

SEQ ID NO: 7629 - DNA, 18 bp, Homo sapiens
ctcctggggtcttcttcc

SEQ ID NO: 7630 - DNA, 18 bp, Homo sapiens
ttcctctcactcctcttc

SEQ ID NO: 7631 - DNA, 18 bp, Homo sapiens
ctcccagtctcctcttcc

SEQ ID NO: 7632 - DNA, 60 bp, Avian infectious bronchitis virus
agaccaagaacaagatcgtgaacacgatgatatagaatcatcggttggcgtgattggttt

SEQ ID NO: 7633 - DNA, 20 bp, Avian infectious bronchitis virus
tcggttggcgtgattggttt

SEQ ID NO: 7634 - DNA, 24 bp, Avian infectious bronchitis virus
accaagaacaagatcgtgaacacg

SEQ ID NO: 7635 - DNA, 17 bp, Homo sapiens
tcgtggttgattggttt

SEQ ID NO: 7636 - DNA, 19 bp, Homo sapiens
ggtggcgtttaaatggttt

SEQ ID NO: 7637 - DNA, 91 bp, Paramecium bursaria Chlorella virus 1
tcttgattgcagacatgaggaatgctgaaatatccgattcatctctagatgaggtagctcggtctttcaacaattatgtcggcgagattga

SEQ ID NO: 7638 - DNA, 24 bp, Paramecium bursaria Chlorella virus 1
tgaaatatccgattcatctctaga

SEQ ID NO: 7639 - DNA, 24 bp, Paramecium bursaria Chlorella virus 1
tctttcaacaattatgtcggcgag

SEQ ID NO: 7640 - DNA, 23 bp, Homo sapiens
tgaggtatcagtcaatctctaga

SEQ ID NO: 7641 - DNA, 19 bp, Homo sapiens
tgaaataccctctctttag

SEQ ID NO: 7642 - DNA, 21 bp, Homo sapiens
tgaaggccattcatctttaga

SEQ ID NO: 7643 - DNA, 23 bp, Homo sapiens
tccttcaataggagcctggtgag

SEQ ID NO: 7644 - DNA, 60 bp, Paramecium bursaria Chlorella virus 1
tctggcacttcaacggcttctggggtgggtttcatcctagaaggtgatgttttggccgga

SEQ ID NO: 7645 - DNA, 24 bp, Paramecium bursaria Chlorella virus 1
ctagaaggtgatgttttggccgga

SEQ ID NO: 7646 - DNA, 24 bp, Paramecium bursaria Chlorella virus 1
caacggcttctggggtgggtttca

SEQ ID NO: 7647 - DNA, 22 bp, Homo sapiens
ccagaaggtgggccagggccgg

SEQ ID NO: 7648 - DNA, 17 bp, Homo sapiens
ggttgatgttttacaga

SEQ ID NO: 7649 - DNA, 21 bp, Homo sapiens
ctagaaggtgagtgtttaagg

SEQ ID NO: 7650 - DNA, 22 bp, Homo sapiens
ccaggaggtgataggatgctgg

SEQ ID NO: 7651 - DNA, 24 bp, Homo sapiens
ctggaatgtgatgttttgctttgg

SEQ ID NO: 7652 - DNA, 23 bp, Homo sapiens
taaacattgatgttttggttgga

SEQ ID NO: 7653 - DNA, 19 bp, Homo sapiens
ggaggaggctttggctgga

SEQ ID NO: 7654 - DNA, 19 bp, Homo sapiens
gagggtggccgcggccgga

SEQ ID NO: 7655 - DNA, 20 bp, Homo sapiens
aggtgacgctggtgggctgg

SEQ ID NO: 7656 - DNA, 15 bp, Homo sapiens
ctagaagatgaggcg

SEQ ID NO: 7657 - DNA, 14 bp, Homo sapiens
ctagaagtgaggcg

SEQ ID NO: 7658 - DNA, 19 bp, Homo sapiens
tgacgttttctggggagtc

SEQ ID NO: 7659 - DNA, 17 bp, Homo sapiens
gcttctgaagtgtttca

SEQ ID NO: 7660 - DNA, 17 bp, Homo sapiens
ggctgggatgtgggttt

SEQ ID NO: 7661 - DNA, 21 bp, Homo sapiens
ggcagtttctgaacccgtttc

SEQ ID NO: 7662 - DNA, 24 bp, Homo sapiens
caacggtgtcttaaagaggtttca

SEQ ID NO: 7663 - DNA, 20 bp, Homo sapiens
ggcttttcttaaaggtttca

SEQ ID NO: 7664 - DNA, 20 bp, Homo sapiens
cggcaggcttttgtaggttt

SEQ ID NO: 7665 - DNA, 18 bp, Homo sapiens
gcttctggatgattttca

SEQ ID NO: 7666 - DNA, 73 bp, Paramecium bursaria Chlorella virus 1
accgccctttacccagtctgatctgatgcaacagaccccaaagacgtgtgtgttccagatcaaagagggtggt

SEQ ID NO: 7667 - DNA, 21 bp, Paramecium bursaria Chlorella virus 1
ttccagatcaaagagggtggt

SEQ ID NO: 7668 - DNA, 24 bp, Paramecium bursaria Chlorella virus 1
gccctttacccagtctgatctgat

SEQ ID NO: 7669 - DNA, 21 bp, Homo sapiens
ttccagatgaggagccctggt

SEQ ID NO: 7670 - DNA, 19 bp, Homo sapiens
ttccagatctgaaggaagc

SEQ ID NO: 7671 - DNA, 16 bp, Homo sapiens
ttccgatcaagacggt

SEQ ID NO: 7672 - DNA, 22 bp, Homo sapiens
ttccatgtcaaaaataggtggt

SEQ ID NO: 7673 - DNA, 18 bp, Homo sapiens
ttctgaatcagaaaaggt

SEQ ID NO: 7674 - DNA, 16 bp, Homo sapiens
ttccaatcaaagctgt

SEQ ID NO: 7675 - DNA, 14 bp, Homo sapiens
ttccagataaaggt

SEQ ID NO: 7676 - DNA, 19 bp, Homo sapiens
ttccagatttagctctggt

SEQ ID NO: 7677 - DNA, 18 bp, Homo sapiens
ttccagattgagtgacag

SEQ ID NO: 7678 - DNA, 15 bp, Homo sapiens
ttccagaccagggtg

SEQ ID NO: 7679 - DNA, 16 bp, Homo sapiens
ttccagatctggggca

SEQ ID NO: 7680 - DNA, 18 bp, Homo sapiens
ttccagataggaattggt

SEQ ID NO: 7681 - DNA, 20 bp, Homo sapiens
ttctagacagagaaagcagt

SEQ ID NO: 7682 - DNA, 15 bp, Homo sapiens
ttccagactgggggc

SEQ ID NO: 7683 - DNA, 16 bp, Homo sapiens
ttccagatatgaggat

SEQ ID NO: 7684 - DNA, 17 bp, Homo sapiens
tcccaggaaagggtggt

SEQ ID NO: 7685 - DNA, 17 bp, Homo sapiens
ttctagataagagggca

SEQ ID NO: 7686 - DNA, 18 bp, Homo sapiens
ttccaggtgaaagcaggt

SEQ ID NO: 7687 - DNA, 15 bp, Homo sapiens
ttccagacgaggctg

SEQ ID NO: 7688 - DNA, 15 bp, Homo sapiens
ttccaaatcgagggt

SEQ ID NO: 7689 - DNA, 18 bp, Homo sapiens
agctacaaggagggtggt

SEQ ID NO: 7690 - DNA, 17 bp, Homo sapiens
ttctaatcaaagagaat

SEQ ID NO: 7691 - DNA, 16 bp, Homo sapiens
tcccggatcaaaggat

SEQ ID NO: 7692 - DNA, 18 bp, Homo sapiens
ttctagattgagggcagc

SEQ ID NO: 7693 - DNA, 15 bp, Homo sapiens
ttccagatgaaggga

SEQ ID NO: 7694 - DNA, 15 bp, Homo sapiens
ttccagatccaggat

SEQ ID NO: 7695 - DNA, 14 bp, Homo sapiens
ttccagatcagggt

SEQ ID NO: 7696 - DNA, 15 bp, Homo sapiens
ttccggatagagggt

SEQ ID NO: 7697 - DNA, 16 bp, Homo sapiens
ttccagaccggagaat

SEQ ID NO: 7698 - DNA, 17 bp, Homo sapiens
ttccagatcgataggat

SEQ ID NO: 7699 - DNA, 18 bp, Homo sapiens
ctccagatctatggtggt

SEQ ID NO: 7700 - DNA, 66 bp, Paramecium bursaria Chlorella virus 1
ggtcggaactctccctgggggctttttgccacctccactccccccaaggatgaagttgcgttgacc

SEQ ID NO: 7701 - DNA, 24 bp, Paramecium bursaria Chlorella virus 1
tcggaactctccctgggggctttt

SEQ ID NO: 7702 - DNA, 24 bp, Paramecium bursaria Chlorella virus 1
cccaaggatgaagttgcgttgacc

SEQ ID NO: 7703 - DNA, 20 bp, Homo sapiens
ggggctcttcctgggcagct

SEQ ID NO: 7704 - DNA, 18 bp, Homo sapiens
ggaactcccggggctttt

SEQ ID NO: 7705 - DNA, 17 bp, Homo sapiens
gggactcttcttgggct

SEQ ID NO: 7706 - DNA, 19 bp, Homo sapiens
ggaaccctttctgcgcttt

SEQ ID NO: 7707 - DNA, 25 bp, Homo sapiens
tcggaggctctctggtactgctttt

SEQ ID NO: 7708 - DNA, 21 bp, Homo sapiens
ggggctccccctctgtctttt

SEQ ID NO: 7709 - DNA, 20 bp, Homo sapiens
ggaattttccctaggcactt

SEQ ID NO: 7710 - DNA, 72 bp, Paramecium bursaria Chlorella virus 1
gcggcgtcggcgtagaaccgttaaaggcacgggaaatcccaatcagccttttgcggttaccgctggcgccgc

SEQ ID NO: 7711 - DNA, 24 bp, Paramecium bursaria Chlorella virus 1
tcagccttttgcggttaccgctgg

SEQ ID NO: 7712 - DNA, 24 bp, Paramecium bursaria Chlorella virus 1
accgttaaaggcacgggaaatccc

SEQ ID NO: 7713 - DNA, 21 bp, Homo sapiens
tcggctctttgcggctgctgg

SEQ ID NO: 7714 - DNA, 19 bp, Homo sapiens
tcagctttctgaattgctg

SEQ ID NO: 7715 - DNA, 19 bp, Homo sapiens
gccttttggggtactttgg

SEQ ID NO: 7716 - DNA, 21 bp, Homo sapiens
cttttgcactcccaccgctgg

SEQ ID NO: 7717 - DNA, 22 bp, Homo sapiens
tcagttttgtgtgcctcgctgg

SEQ ID NO: 7718 - DNA, 74 bp, Paramecium bursaria Chlorella virus 1
tgccttttctgagaggtttcaaacgattgtttaccttttgtttccaaatttttgcaacttttctcactacggca

SEQ ID NO: 7719 - DNA, 24 bp, Paramecium bursaria Chlorella virus 1
tgagaggtttcaaacgattgttta

SEQ ID NO: 7720 - DNA, 24 bp, Paramecium bursaria Chlorella virus 1
tccaaatttttgcaacttttctca

SEQ ID NO: 7721 - DNA, 19 bp, Homo sapiens
tgagaagtttctgttgttt

SEQ ID NO: 7722 - DNA, 15 bp, Homo sapiens
tggaggtttattgtt

SEQ ID NO: 7723 - DNA, 18 bp, Homo sapiens
tgggaggttccagatgct

SEQ ID NO: 7724 - DNA, 21 bp, Homo sapiens
tgagaggtttgtaaattactt

SEQ ID NO: 7725 - DNA, 16 bp, Homo sapiens
caaatttttgcctttt

SEQ ID NO: 7726 - DNA, 23 bp, Homo sapiens
tctagatttctgcaacatcctca

SEQ ID NO: 7727 - DNA, 23 bp, Homo sapiens
tccaaattttggcaatacactca

SEQ ID NO: 7728 - DNA, 19 bp, Homo sapiens
tccaaattttttttctttt

SEQ ID NO: 7729 - DNA, 21 bp, Homo sapiens
aatttttgcccttgtttctca

SEQ ID NO: 7730 - DNA, 18 bp, Homo sapiens
tccaaattcttgtgactt

SEQ ID NO: 7731 - DNA, 18 bp, Homo sapiens
atttctataacttttctc

SEQ ID NO: 7732 - DNA, 26 bp, Homo sapiens
tccaatatttacaacttaatttttct

SEQ ID NO: 7733 - DNA, 109 bp, Paramecium bursaria Chlorella virus 1
tgttttgaacgggtgggatgacaggttcgcgtatgatttcgcgtttggtttcgattttaggcgtgaatagtttcttcacgtatatctttttatcccctggtttgacata

SEQ ID NO: 7734 - DNA, 17 bp, Paramecium bursaria Chlorella virus 1
tcccctggtttgacata

SEQ ID NO: 7735 - DNA, 24 bp, Paramecium bursaria Chlorella virus 1
gcgtatgatttcgcgtttggtttc

SEQ ID NO: 7736 - DNA, 18 bp, Homo sapiens
ccttgggtgtttgacata

SEQ ID NO: 7737 - DNA, 19 bp, Homo sapiens
tctcctagctcagtacata

SEQ ID NO: 7738 - DNA, 19 bp, Homo sapiens
ccccctgagctggggcata

SEQ ID NO: 7739 - DNA, 18 bp, Homo sapiens
cctcctggtccccaacat

SEQ ID NO: 7740 - DNA, 18 bp, Homo sapiens
tccccttggttttccata

SEQ ID NO: 7741 - DNA, 21 bp, Homo sapiens
gcgtgtgacttcgtgtgagtc

SEQ ID NO: 7742 - DNA, 19 bp, Homo sapiens
tatggtcacattttggttt

SEQ ID NO: 7743 - DNA, 18 bp, Homo sapiens
gcatgtgatttcaggttt

SEQ ID NO: 7744 - DNA, 66 bp, Paramecium bursaria Chlorella virus 1
cgggattttctttccagttggcccgataacgtacttacccccacgcggtcctgtaagaatctctcg

SEQ ID NO: 7745 - DNA, 24 bp, Paramecium bursaria Chlorella virus 1
ttccagttggcccgataacgtact

SEQ ID NO: 7746 - DNA, 19 bp, Paramecium bursaria Chlorella virus 1
gtcctgtaagaatctctcg

SEQ ID NO: 7747 - DNA, 19 bp, Homo sapiens
ttccagttggtatggtacc

SEQ ID NO: 7748 - DNA, 73 bp, Human herpesvirus 5
tccatttttatcctcgcacttcttcgctctcaaagccgcctttaaagttgaaatgaaaggatggaaacatgga

SEQ ID NO: 7749 - DNA, 24 bp, Human herpesvirus 5
tgaaatgaaaggatggaaacatgg

SEQ ID NO: 7750 - DNA, 24 bp, Human herpesvirus 5
tttatcctcgcacttcttcgctct

SEQ ID NO: 7751 - DNA, 21 bp, Homo sapiens
gaatggaaaggtggaaccagg

SEQ ID NO: 7752 - DNA, 23 bp, Homo sapiens
tgagggggaaggatggtgtgtgg

SEQ ID NO: 7753 - DNA, 22 bp, Homo sapiens
tgaagggggcagggaaacatgg

SEQ ID NO: 7754 - DNA, 21 bp, Homo sapiens
tgacaggagatggaaacatgg

SEQ ID NO: 7755 - DNA, 22 bp, Homo sapiens
tgaaagggaaggggcgacatgg

SEQ ID NO: 7756 - DNA, 22 bp, Homo sapiens
tgagaatgaaaattgggcatgg

SEQ ID NO: 7757 - DNA, 19 bp, Homo sapiens
gaaaggaagccaagcatgg

SEQ ID NO: 7758 - DNA, 21 bp, Homo sapiens
tgaaatggaagggttgacatg

SEQ ID NO: 7759 - DNA, 18 bp, Homo sapiens
tgaaaggaggatgacatg

SEQ ID NO: 7760 - DNA, 18 bp, Homo sapiens
tgccgggtggaaacatgg

SEQ ID NO: 7761 - DNA, 19 bp, Homo sapiens
atgaaagatgagaatatgg

SEQ ID NO: 7762 - DNA, 21 bp, Homo sapiens
tgatgtgaaagatggatatgg

SEQ ID NO: 7763 - DNA, 106 bp, Human herpesvirus 5
gacttcacagaagagggcaaaacaaaaacattgtgtgtagtgttagataacagtcatattttagctaccatagtcttatttttttttctctgttttgttttaagtc

SEQ ID NO: 7764 - DNA, 24 bp, Human herpesvirus 5
taccatagtcttatttttttttct

SEQ ID NO: 7765 - DNA, 24 bp, Human herpesvirus 5
acaaaaacattgtgtgtagtgtta

SEQ ID NO: 7766 - DNA, 23 bp, Homo sapiens
catagtctctgagttttttttct

SEQ ID NO: 7767 - DNA, 20 bp, Homo sapiens
taccaggtcttattcattct

SEQ ID NO: 7768 - DNA, 22 bp, Homo sapiens
cctgtttcttatttttttttct

SEQ ID NO: 7769 - DNA, 19 bp, Homo sapiens
acagcttatttttttttct

SEQ ID NO: 7770 - DNA, 18 bp, Homo sapiens
agttttatttttttttct

SEQ ID NO: 7771 - DNA, 22 bp, Homo sapiens
catagtcttgtcttatatttct

SEQ ID NO: 7772 - DNA, 23 bp, Homo sapiens
taccataaaacatttttttttct

SEQ ID NO: 7773 - DNA, 19 bp, Homo sapiens
catagtcttattcattttt

SEQ ID NO: 7774 - DNA, 19 bp, Homo sapiens
tacttagtcttactttttt

SEQ ID NO: 7775 - DNA, 23 bp, Homo sapiens
accatgcccggctattttttttt

SEQ ID NO: 7776 - DNA, 22 bp, Homo sapiens
taccacagtgtaattttttttt

SEQ ID NO: 7777 - DNA, 19 bp, Homo sapiens
ccatagtcttcacattttt

SEQ ID NO: 7778 - DNA, 18 bp, Homo sapiens
acaagacattgtgtgagc

SEQ ID NO: 7779 - DNA, 17 bp, Homo sapiens
aacattgttgctttgtt

SEQ ID NO: 7780 - DNA, 22 bp, Homo sapiens
acaaaaactttgcccgagtgtt

SEQ ID NO: 7781 - DNA, 19 bp, Homo sapiens
aacattatatgttagtgtt

SEQ ID NO: 7782 - DNA, 18 bp, Homo sapiens
aaacgttgtgtgcaagtt

SEQ ID NO: 7783 - DNA, 18 bp, Homo sapiens
aaaacactgtggatgtta

SEQ ID NO: 7784 - DNA, 87 bp, Human herpesvirus 5
cagatatatcgatatccaattaggcaagtgaaacttcaatatgtttattgcagtctccaaatttagtttagtttgatatgttgtctg

SEQ ID NO: 7785 - DNA, 24 bp, Human herpesvirus 5
tatccaattaggcaagtgaaactt

SEQ ID NO: 7786 - DNA, 24 bp, Human herpesvirus 5
cagtctccaaatttagtttagttt

SEQ ID NO: 7787 - DNA, 17 bp, Homo sapiens
caatacaggtgaaactt

SEQ ID NO: 7788 - DNA, 20 bp, Homo sapiens
tatccaataaggtaattaaa

SEQ ID NO: 7789 - DNA, 22 bp, Homo sapiens
cagtttccaaaatattcagttt

SEQ ID NO: 7790 - DNA, 22 bp, Homo sapiens
cagttctcaaagagcttagttt

SEQ ID NO: 7791 - DNA, 20 bp, Homo sapiens
atctccaaatttagctgttt

SEQ ID NO: 7792 - DNA, 104 bp, Yaba-like disease virus
cctgccgaggaacgtcaccaggtgcggttgcagggggcagtcgggaaagtggctgtcgaggacgtatccctgcaccaagatctgtttgaagttcgggtggcggg

SEQ ID NO: 7793 - DNA, 24 bp, Yaba-like disease virus
tgtcgaggacgtatccctgcacca

SEQ ID NO: 7794 - DNA, 24 bp, Yaba-like disease virus
aggaacgtcaccaggtgcggttgc

SEQ ID NO: 7795 - DNA, 19 bp, Homo sapiens
gaggacaggggctgcacca

SEQ ID NO: 7796 - DNA, 22 bp, Homo sapiens
gatggctttggtccctgcatca

SEQ ID NO: 7797 - DNA, 21 bp, Homo sapiens
tcgaggggttgcccctgcacc

SEQ ID NO: 7798 - DNA, 22 bp, Homo sapiens
tgccgaggattcgcctgcgcca

SEQ ID NO: 7799 - DNA, 19 bp, Homo sapiens
agggacagtcaccagttgc

SEQ ID NO: 7800 - DNA, 18 bp, Homo sapiens
aggagcgctgtgcggttg

SEQ ID NO: 7801 - DNA, 19 bp, Homo sapiens
ggaatgcaccaggtagggt

SEQ ID NO: 7802 - DNA, 20 bp, Homo sapiens
aggagtgttacgaggtacaa

SEQ ID NO: 7803 - DNA, 19 bp, Homo sapiens
gggactcaccaggctgtgc

SEQ ID NO: 7804 - DNA, 70 bp, Reston Ebola virus
gatgaagattaattgcggaggaatcaggaattcaactttagttccttaaggcctcgtccgaatcttcatc

SEQ ID NO: 7805 - DNA, 24 bp, Reston Ebola virus
ttccttaaggcctcgtccgaatct

SEQ ID NO: 7806 - DNA, 24 bp, Reston Ebola virus
tgaagattaattgcggaggaatca

SEQ ID NO: 7807 - DNA, 19 bp, Homo sapiens
ttcttcaaggccttctgtc

SEQ ID NO: 7808 - DNA, 100 bp, Reston Ebola virus
ttagcttctaaggtgattatattttagtattaaattttgctaattgcttgctataaagttgaaatgtctaatgcttaaatgaacacttttttgaagctga

SEQ ID NO: 7809 - DNA, 24 bp, Reston Ebola virus
taaggtgattatattttagtatta

SEQ ID NO: 7810 - DNA, 24 bp, Reston Ebola virus
ttgaaatgtctaatgcttaaatga

SEQ ID NO: 7811 - DNA, 21 bp, Homo sapiens
aggtgattttattcttccatt

SEQ ID NO: 7812 - DNA, 22 bp, Homo sapiens
agcgagacatattttagtatta

SEQ ID NO: 7813 - DNA, 62 bp, Monkeypox virus
gtctactagagccttgctgttaacggtatctgatacagcacccgtagacaacgaggcgggac

SEQ ID NO: 7814 - DNA, 24 bp, Monkeypox virus
cacccgtagacaacgaggcgggac

SEQ ID NO: 7815 - DNA, 24 bp, Monkeypox virus
actagagccttgctgttaacggta

SEQ ID NO: 7816 - DNA, 17 bp, Homo sapiens
cccgaggcggcggcgag

SEQ ID NO: 7817 - DNA, 17 bp, Homo sapiens
cagccgagcgaggcggg

SEQ ID NO: 7818 - DNA, 19 bp, Homo sapiens
cacccgtagtggaaagggg

SEQ ID NO: 7819 - DNA, 21 bp, Homo sapiens
cccgcagatgacccgggggac

SEQ ID NO: 7820 - DNA, 18 bp, Homo sapiens
cacctgtgggagacggga

SEQ ID NO: 7821 - DNA, 23 bp, Homo sapiens
cacccgtagatgggaaggaggga

SEQ ID NO: 7822 - DNA, 24 bp, Homo sapiens
cacccggaggctcctcggcgggac

SEQ ID NO: 7823 - DNA, 20 bp, Homo sapiens
cccgaagacaggtgcgggac

SEQ ID NO: 7824 - DNA, 17 bp, Homo sapiens
actagagccttttgtca

SEQ ID NO: 7825 - DNA, 16 bp, Homo sapiens
taggccttgctatggt

SEQ ID NO: 7826 - DNA, 17 bp, Homo sapiens
gctcttgctatgtggta

SEQ ID NO: 7827 - DNA, 17 bp, Homo sapiens
cagggccttgctggggt

SEQ ID NO: 7828 - DNA, 24 bp, Homo sapiens
cagggccttgctcccaggatggta

SEQ ID NO: 7829 - DNA, 77 bp, Monkeypox virus
gacgtatcagatttttacacccaaaccaactgcgtgcgcagcgtttattaaggacgcgggactgctactgaggcgtc

SEQ ID NO: 7830 - DNA, 24 bp, Monkeypox virus
tatcagatttttacacccaaacca

SEQ ID NO: 7831 - DNA, 24 bp, Monkeypox virus
agcgtttattaaggacgcgggact

SEQ ID NO: 7832 - DNA, 18 bp, Homo sapiens
gaaggaacacccaaacca

SEQ ID NO: 7833 - DNA, 19 bp, Homo sapiens
tcagatctcccccaagcca

SEQ ID NO: 7834 - DNA, 22 bp, Homo sapiens
tatcagatttttttttccaaac

SEQ ID NO: 7835 - DNA, 16 bp, Homo sapiens
tagcagacacccaaac

SEQ ID NO: 7836 - DNA, 23 bp, Homo sapiens
cagattttgagtacttcaaacca

SEQ ID NO: 7837 - DNA, 15 bp, Homo sapiens
tcaggttacccaaac

SEQ ID NO: 7838 - DNA, 19 bp, Homo sapiens
acgtttattgagggtctgc

SEQ ID NO: 7839 - DNA, 72 bp, Swinepox virus
ggggaacttgggcatgggggctacggtcacgttgttgaggatcagcggggcgtagtctgtgctattgtccct

SEQ ID NO: 7840 - DNA, 24 bp, Swinepox virus
gggcatgggggctacggtcacgtt

SEQ ID NO: 7841 - DNA, 24 bp, Swinepox virus
ggcgtagtctgtgctattgtccct

SEQ ID NO: 7842 - DNA, 20 bp, Homo sapiens
gtctggtctggtctgtccct

SEQ ID NO: 7843 - DNA, 22 bp, Homo sapiens
ggtgtggtcagctgctgtccct

SEQ ID NO: 7844 - DNA, 71 bp, Human foamy virus
ctccacctctggaattcaggacctgcagactctgagtgagcttgttggccctgaaaatgccggagagggag

SEQ ID NO: 7845 - DNA, 24 bp, Human foamy virus
tcaggacctgcagactctgagtga

SEQ ID NO: 7846 - DNA, 24 bp, Human foamy virus
tggccctgaaaatgccggagaggg

SEQ ID NO: 7847 - DNA, 17 bp, Homo sapiens
ggaatgtcctctgagtg

SEQ ID NO: 7848 - DNA, 24 bp, Homo sapiens
tcgggactgcagactcagacggtg

SEQ ID NO: 7849 - DNA, 17 bp, Homo sapiens
ggccagcagctgagtga

SEQ ID NO: 7850 - DNA, 20 bp, Homo sapiens
ggctgccagattctgagtga

SEQ ID NO: 7851 - DNA, 19 bp, Homo sapiens
tcagggcctggcccgagtg

SEQ ID NO: 7852 - DNA, 25 bp, Homo sapiens
tcaggacctcagactcctcagggtg

SEQ ID NO: 7853 - DNA, 17 bp, Homo sapiens
tcaggacctcagactcc

SEQ ID NO: 7854 - DNA, 16 bp, Homo sapiens
tcaggttcttctgagt

SEQ ID NO: 7855 - DNA, 19 bp, Homo sapiens
caggatctagatctgagtg

SEQ ID NO: 7856 - DNA, 21 bp, Homo sapiens
tggccctggagggagagaggg

SEQ ID NO: 7857 - DNA, 24 bp, Homo sapiens
tggccctgatggaggatcagaggg

SEQ ID NO: 7858 - DNA, 24 bp, Homo sapiens
ggtcctggggcctgggggagaggg

SEQ ID NO: 7859 - DNA, 23 bp, Homo sapiens
tggcctctgaagtggggagaggg

SEQ ID NO: 7860 - DNA, 26 bp, Homo sapiens
tggccctgacagatcagggaggaggg

SEQ ID NO: 7861 - DNA, 16 bp, Homo sapiens
tggcctgagagaagag

SEQ ID NO: 7862 - DNA, 21 bp, Homo sapiens
tggccccgggagtgagcaggg

SEQ ID NO: 7863 - DNA, 16 bp, Homo sapiens
gccctggaaagagagg

SEQ ID NO: 7864 - DNA, 23 bp, Homo sapiens
ggccctgaggggcttggggaggg

SEQ ID NO: 7865 - DNA, 23 bp, Homo sapiens
tggccctgaaggtctgccctggg

SEQ ID NO: 7866 - DNA, 18 bp, Homo sapiens
tggccctgagaggctcgg

SEQ ID NO: 7867 - DNA, 24 bp, Homo sapiens
tggccctaggctcaaaggagaggg

SEQ ID NO: 7868 - DNA, 20 bp, Homo sapiens
ggttctgagagcaaagaggg

SEQ ID NO: 7869 - DNA, 16 bp, Homo sapiens
ggccttggagagaggg

SEQ ID NO: 7870 - DNA, 15 bp, Homo sapiens
tggcctgagggagag

SEQ ID NO: 7871 - DNA, 18 bp, Homo sapiens
tggccttgcaagatgagg

SEQ ID NO: 7872 - DNA, 17 bp, Homo sapiens
tggccctgagagacagg

SEQ ID NO: 7873 - DNA, 24 bp, Homo sapiens
tggccctgggtggcgtggggaggg

SEQ ID NO: 7874 - DNA, 18 bp, Homo sapiens
tggccctgcagaatgagg

SEQ ID NO: 7875 - DNA, 19 bp, Homo sapiens
tagcctcttgctggagagg

SEQ ID NO: 7876 - DNA, 20 bp, Homo sapiens
ggtcctgtggttggagaggg

SEQ ID NO: 7877 - DNA, 24 bp, Homo sapiens
tggctcctggagaaggggggaggg

SEQ ID NO: 7878 - DNA, 20 bp, Homo sapiens
tggccctgggggtccgccaa

SEQ ID NO: 7879 - DNA, 20 bp, Homo sapiens
ggccctgaggctggagaggg

SEQ ID NO: 7880 - DNA, 22 bp, Homo sapiens
tggccctggtgtagtgggaggg

SEQ ID NO: 7881 - DNA, 19 bp, Homo sapiens
tggccctgaggtgcatggg

SEQ ID NO: 7882 - DNA, 19 bp, Homo sapiens
tggccccggggccgggagg

SEQ ID NO: 7883 - DNA, 21 bp, Homo sapiens
tgaccctgaagccagggaggg

SEQ ID NO: 7884 - DNA, 17 bp, Homo sapiens
tggccctgagatgctgg

SEQ ID NO: 7885 - DNA, 21 bp, Homo sapiens
ggccttgggggatgaagaggg

SEQ ID NO: 7886 - DNA, 15 bp, Homo sapiens
tggcccgagagagag

SEQ ID NO: 7887 - DNA, 62 bp, Human foamy virus
atttcagtctaaatgctaaatcaacagaatcaagttctgtaaatggagtatttatctgagat

SEQ ID NO: 7888 - DNA, 24 bp, Human foamy virus
tgtaaatggagtatttatctgaga

SEQ ID NO: 7889 - DNA, 24 bp, Human foamy virus
tctaaatgctaaatcaacagaatc

SEQ ID NO: 7890 - DNA, 21 bp, Homo sapiens
taaagtgcgggtcaacagaat

SEQ ID NO: 7891 - DNA, 18 bp, Homo sapiens
tctaaatgctaaacaaaa

SEQ ID NO: 7892 - DNA, 18 bp, Homo sapiens
taagtgctaaacaacaaa

SEQ ID NO: 7893 - DNA, 17 bp, Homo sapiens
aacggaatcaacagaat

SEQ ID NO: 7894 - DNA, 22 bp, Homo sapiens
tctaaatgctggagtttaaatc

SEQ ID NO: 7895 - DNA, 76 bp, Human foamy virus
cagccacttatgaattaattcttctgatagctcatttcggttataatatccaattaataattcaaaaaagtctctg

SEQ ID NO: 7896 - DNA, 24 bp, Human foamy virus
tgaattaattcttctgatagctca

SEQ ID NO: 7897 - DNA, 24 bp, Human foamy virus
ttataatatccaattaataattca

SEQ ID NO: 7898 - DNA, 25 bp, Homo sapiens
ttataactattcaatcaatgattca

SEQ ID NO: 7899 - DNA, 83 bp, Human foamy virus
cattcagttttataagaattatcagattctaacttgctgtcaggctgtagacccatttgctaatatttttcatggtactgatg

SEQ ID NO: 7900 - DNA, 24 bp, Human foamy virus
tataagaattatcagattctaact

SEQ ID NO: 7901 - DNA, 24 bp, Human foamy virus
tgtagacccatttgctaatatttt

SEQ ID NO: 7902 - DNA, 18 bp, Homo sapiens
taagaatccagcattcta

SEQ ID NO: 7903 - DNA, 78 bp, Human foamy virus
gtgtgtcttatcatgcatataaagaaattgaggacaaacatcctcaacatattaaactgcaggattggatccccacac

SEQ ID NO: 7904 - DNA, 24 bp, Human foamy virus
tcaacatattaaactgcaggattg

SEQ ID NO: 7905 - DNA, 24 bp, Human foamy virus
tatcatgcatataaagaaattgag

SEQ ID NO: 7906 - DNA, 19 bp, Homo sapiens
acatattaaacgtgaattg

SEQ ID NO: 7907 - DNA, 18 bp, Homo sapiens
acatattaaacatgattg

SEQ ID NO: 7908 - DNA, 24 bp, Homo sapiens
tcagcatattaagctgcacaattg

SEQ ID NO: 7909 - DNA, 22 bp, Homo sapiens
tatcatgcattaaattttagag

SEQ ID NO: 7910 - DNA, 19 bp, Homo sapiens
tcatgcatgggtgaagttg

SEQ ID NO: 7911 - DNA, 18 bp, Homo sapiens
acagatgaagaaattgag

SEQ ID NO: 7912 - DNA, 17 bp, Homo sapiens
tcatgcatatgggatga

SEQ ID NO: 7913 - DNA, 64 bp, Human foamy virus
aagttaaaactgttgctagatcttttaatgagatattataatcatttctaggtagttccaattt

SEQ ID NO: 7914 - DNA, 24 bp, Human foamy virus
tgctagatcttttaatgagatatt

SEQ ID NO: 7915 - DNA, 20 bp, Human foamy virus
tttctaggtagttccaattt

SEQ ID NO: 7916 - DNA, 17 bp, Homo sapiens
tctctagcatccaattt

SEQ ID NO: 7917 - DNA, 18 bp, Homo sapiens
tttctataattccaattt

SEQ ID NO: 7918 - DNA, 18 bp, Homo sapiens
ttcttggttttccaattt

SEQ ID NO: 7919 - DNA, 18 bp, Homo sapiens
tttccaggtacctaattt

SEQ ID NO: 7920 - DNA, 19 bp, Homo sapiens
ttcctaaattgtccaattt

SEQ ID NO: 7921 - DNA, 60 bp, Human herpesvirus 1
cccattagagttctgacaaatcaaaccatgtatttgggtggttcgcctgactttcatggg

SEQ ID NO: 7922 - DNA, 24 bp, Human herpesvirus 1
ttagagttctgacaaatcaaacca

SEQ ID NO: 7923 - DNA, 23 bp, Human herpesvirus 1
gtggttcgcctgactttcatggg

SEQ ID NO: 7924 - DNA, 20 bp, Homo sapiens
gagctctgagccctaaacca

SEQ ID NO: 7925 - DNA, 18 bp, Homo sapiens
ttagggtcctgacgatca

SEQ ID NO: 7926 - DNA, 19 bp, Homo sapiens
ttagagtctgatagcatca

SEQ ID NO: 7927 - DNA, 20 bp, Homo sapiens
gagtatatcaggtcaaacca

SEQ ID NO: 7928 - DNA, 23 bp, Homo sapiens
ttaaagttttctccctcaaacca

SEQ ID NO: 7929 - DNA, 19 bp, Homo sapiens
ttagagttctggtattacc

SEQ ID NO: 7930 - DNA, 17 bp, Homo sapiens
gtggttcttgctcatgg

SEQ ID NO: 7931 - DNA, 17 bp, Homo sapiens
ggtgctgacttttgtgg

SEQ ID NO: 7932 - DNA, 20 bp, Homo sapiens
ggcgaactgattttcatggg

SEQ ID NO: 7933 - DNA, 73 bp, Human herpesvirus 1
gccgcctcccccgagtcttcggaatgtcttggcggccgtcaagaactgttatcccgaggcacggatgagcggc

SEQ ID NO: 7934 - DNA, 24 bp, Human herpesvirus 1
caagaactgttatcccgaggcacg

SEQ ID NO: 7935 - DNA, 24 bp, Human herpesvirus 1
cccccgagtcttcggaatgtcttg

SEQ ID NO: 7936 - DNA, 19 bp, Homo sapiens
tgagaactgttttcaccaa

SEQ ID NO: 7937 - DNA, 17 bp, Homo sapiens
gagctgttatccatcac

SEQ ID NO: 7938 - DNA, 18 bp, Homo sapiens
caagaacagcctctgagg

SEQ ID NO: 7939 - DNA, 18 bp, Homo sapiens
aaaactgttgtccttgcg

SEQ ID NO: 7940 - DNA, 14 bp, Homo sapiens
agaactgttgcacg

SEQ ID NO: 7941 - DNA, 18 bp, Homo sapiens
aagaattgttatccatag

SEQ ID NO: 7942 - DNA, 17 bp, Homo sapiens
caagaactgagaggccg

SEQ ID NO: 7943 - DNA, 66 bp, Human herpesvirus 1
ctacatctgcctgtgttacttacccttatgccatattattaggattacctcagttaatagatatag

SEQ ID NO: 7944 - DNA, 21 bp, Human herpesvirus 1
tacctcagttaatagatatag

SEQ ID NO: 7945 - DNA, 24 bp, Human herpesvirus 1
catctgcctgtgttacttaccctt

SEQ ID NO: 7946 - DNA, 17 bp, Homo sapiens
cccctgaatagatatag

SEQ ID NO: 7947 - DNA, 17 bp, Homo sapiens
tacctagttaataaata

SEQ ID NO: 7948 - DNA, 15 bp, Homo sapiens
ctcaaatagatatag

SEQ ID NO: 7949 - DNA, 20 bp, Homo sapiens
cctcagttgattaaacatag

SEQ ID NO: 7950 - DNA, 18 bp, Homo sapiens
ctcagtcaatttacatag

SEQ ID NO: 7951 - DNA, 18 bp, Homo sapiens
ctgcctgtgttaacaaac

SEQ ID NO: 7952 - DNA, 19 bp, Homo sapiens
catctgtctttagttactt

SEQ ID NO: 7953 - DNA, 15 bp, Homo sapiens
cagctgccacttacc

SEQ ID NO: 7954 - DNA, 20 bp, Homo sapiens
cacctgttatctgtttactc

SEQ ID NO: 7955 - DNA, 21 bp, Homo sapiens
tctgcctgtgcccagggcctt

SEQ ID NO: 7956 - DNA, 130 bp, Equine herpesvirus 4
gaggccacacccacatggaggccacacccacatggaggccacacccacatggaggccacacccacatggaggccacacccacatggaggccacacccacatggaggccacacccacatggaggccacacc

SEQ ID NO: 7957 - DNA, 24 bp, Equine herpesvirus 4
aggccacacccacatggaggccac

SEQ ID NO: 7958 - DNA, 24 bp, Equine herpesvirus 4
tggaggccacacccacatggaggc

SEQ ID NO: 7959 - DNA, 20 bp, Homo sapiens
ggccgttgtcccgaggccac

SEQ ID NO: 7960 - DNA, 18 bp, Homo sapiens
ggccacaccccaaactgc

SEQ ID NO: 7961 - DNA, 17 bp, Homo sapiens
ggccacacccggtgcca

SEQ ID NO: 7962 - DNA, 18 bp, Homo sapiens
ggccacacttgcatggag

SEQ ID NO: 7963 - DNA, 19 bp, Homo sapiens
aggctgcagtccaccaggg

SEQ ID NO: 7964 - DNA, 22 bp, Homo sapiens
aggccagttcacacagagtcac

SEQ ID NO: 7965 - DNA, 16 bp, Homo sapiens
ggccacgacggaggcc

SEQ ID NO: 7966 - DNA, 18 bp, Homo sapiens
aagccatgcctgctgcca

SEQ ID NO: 7967 - DNA, 21 bp, Homo sapiens
ggccccacccacagcagctgc

SEQ ID NO: 7968 - DNA, 20 bp, Homo sapiens
agatcacacccacccggggc

SEQ ID NO: 7969 - DNA, 18 bp, Homo sapiens
agaccactgtgggggtca

SEQ ID NO: 7970 - DNA, 18 bp, Homo sapiens
aggccagccccaggctgc

SEQ ID NO: 7971 - DNA, 22 bp, Homo sapiens
ggccacaccattgcctggctgc

SEQ ID NO: 7972 - DNA, 20 bp, Homo sapiens
agccacacccgggcggccac

SEQ ID NO: 7973 - DNA, 21 bp, Homo sapiens
agctgcacagttcggaggcca

SEQ ID NO: 7974 - DNA, 22 bp, Homo sapiens
aggcctcacccacaacctccca

SEQ ID NO: 7975 - DNA, 19 bp, Homo sapiens
aggccacacccagtgaggc

SEQ ID NO: 7976 - DNA, 21 bp, Homo sapiens
aggtcacacccacagtgatgc

SEQ ID NO: 7977 - DNA, 18 bp, Homo sapiens
aggccagcctgggggcca

SEQ ID NO: 7978 - DNA, 18 bp, Homo sapiens
aggccacatcctcatgcc

SEQ ID NO: 7979 - DNA, 18 bp, Homo sapiens
ggccacacccagtgcaga

SEQ ID NO: 7980 - DNA, 22 bp, Homo sapiens
ggccacggtcacacaaagccac

SEQ ID NO: 7981 - DNA, 18 bp, Homo sapiens
agggcacacccatgctca

SEQ ID NO: 7982 - DNA, 23 bp, Homo sapiens
aggtctcatctcctagaggccac

SEQ ID NO: 7983 - DNA, 19 bp, Homo sapiens
ggccacaccaacacagcca

SEQ ID NO: 7984 - DNA, 18 bp, Homo sapiens
aggccacaccatcagcca

SEQ ID NO: 7985 - DNA, 21 bp, Homo sapiens
aggccacacccatgtgactgc

SEQ ID NO: 7986 - DNA, 20 bp, Homo sapiens
ggccacactcggcagtccca

SEQ ID NO: 7987 - DNA, 21 bp, Homo sapiens
aggccacacctggacaatcac

SEQ ID NO: 7988 - DNA, 23 bp, Homo sapiens
agccacacctgggtgcaggccac

SEQ ID NO: 7989 - DNA, 16 bp, Homo sapiens
aggccacttccagagg

SEQ ID NO: 7990 - DNA, 18 bp, Homo sapiens
agaccacacccatgtggc

SEQ ID NO: 7991 - DNA, 21 bp, Homo sapiens
ggctcaccctgaccaggtcac

SEQ ID NO: 7992 - DNA, 23 bp, Homo sapiens
aggacacgaaggagtgggggcca

SEQ ID NO: 7993 - DNA, 18 bp, Homo sapiens
aggccccacccacaccca

SEQ ID NO: 7994 - DNA, 19 bp, Homo sapiens
gccacacccatgtgcccac

SEQ ID NO: 7995 - DNA, 21 bp, Homo sapiens
aggctgagctcataaggccac

SEQ ID NO: 7996 - DNA, 18 bp, Homo sapiens
aagccacacccatgaggc

SEQ ID NO: 7997 - DNA, 20 bp, Homo sapiens
aggacacacagaggaggtca

SEQ ID NO: 7998 - DNA, 17 bp, Homo sapiens
ggccggccaggaggcca

SEQ ID NO: 7999 - DNA, 21 bp, Homo sapiens
ggcccacacccatgaattcac

SEQ ID NO: 8000 - DNA, 21 bp, Homo sapiens
ggtcactacccacgaggccac

SEQ ID NO: 8001 - DNA, 19 bp, Homo sapiens
aggccagtgccctgggcca

SEQ ID NO: 8002 - DNA, 26 bp, Homo sapiens
ggccacaccctcgctatgtggcctcc

SEQ ID NO: 8003 - DNA, 19 bp, Homo sapiens
ggccacaccccatgcctgc

SEQ ID NO: 8004 - DNA, 23 bp, Homo sapiens
ggccacacgcagcttcggaggcc

SEQ ID NO: 8005 - DNA, 14 bp, Homo sapiens
ggccacaccggcca

SEQ ID NO: 8006 - DNA, 21 bp, Homo sapiens
ggccacacatgccatggccac

SEQ ID NO: 8007 - DNA, 15 bp, Homo sapiens
aggccacagccaggc

SEQ ID NO: 8008 - DNA, 27 bp, Homo sapiens
aggccatttctacaccatgtggcctcc

SEQ ID NO: 8009 - DNA, 20 bp, Homo sapiens
ggctgaactcgtgaagccac

SEQ ID NO: 8010 - DNA, 25 bp, Homo sapiens
agccacagaggcctatgggggccac

SEQ ID NO: 8011 - DNA, 20 bp, Homo sapiens
ggccacacgctggcggtcac

SEQ ID NO: 8012 - DNA, 21 bp, Homo sapiens
ggcctgtcctgctgaggccac

SEQ ID NO: 8013 - DNA, 18 bp, Homo sapiens
ggcctgcacccacagacc

SEQ ID NO: 8014 - DNA, 14 bp, Homo sapiens
aggccacacctgga

SEQ ID NO: 8015 - DNA, 17 bp, Homo sapiens
ggccacacccgtgtggc

SEQ ID NO: 8016 - DNA, 15 bp, Homo sapiens
agccacacccacggc

SEQ ID NO: 8017 - DNA, 18 bp, Homo sapiens
ggccacatccacgggggc

SEQ ID NO: 8018 - DNA, 19 bp, Homo sapiens
aggccagacctgcagcacc

SEQ ID NO: 8019 - DNA, 62 bp, Equine herpesvirus 4
agtgcgggttacacagtgcgtgttacacaccgggtatacacaattgttcctgctcgttaact

SEQ ID NO: 8020 - DNA, 24 bp, Equine herpesvirus 4
tacacaattgttcctgctcgttaa

SEQ ID NO: 8021 - DNA, 24 bp, Equine herpesvirus 4
tacacagtgcgtgttacacaccgg

SEQ ID NO: 8022 - DNA, 21 bp, Homo sapiens
acaattgtccttgtatgctaa

SEQ ID NO: 8023 - DNA, 18 bp, Homo sapiens
cacgcggcactgctcgtt

SEQ ID NO: 8024 - DNA, 67 bp, Equine herpesvirus 4
taagcttttcctttggagctcctccctaaatgccttggctatttagccttccgctcctgtctgctta

SEQ ID NO: 8025 - DNA, 24 bp, Equine herpesvirus 4
ttggagctcctccctaaatgcctt

SEQ ID NO: 8026 - DNA, 24 bp, Equine herpesvirus 4
ttagccttccgctcctgtctgctt

SEQ ID NO: 8027 - DNA, 19 bp, Homo sapiens
ttggagcttttccacacct

SEQ ID NO: 8028 - DNA, 17 bp, Homo sapiens
ttgggtgtccctaaatg

SEQ ID NO: 8029 - DNA, 75 bp, Equine herpesvirus 4
gcaggaacttcatgatggacttcttggcgtcgctaccgcggtcgtgcttctccatcatctccaccatcttcttgc

SEQ ID NO: 8030 - DNA, 24 bp, Equine herpesvirus 4
tgatggacttcttggcgtcgctac

SEQ ID NO: 8031 - DNA, 24 bp, Equine herpesvirus 4
tcgtgcttctccatcatctccacc

SEQ ID NO: 8032 - DNA, 24 bp, Homo sapiens
tggtgtgcttcttgacgacttgct

SEQ ID NO: 8033 - DNA, 22 bp, Homo sapiens
tggtggacttctaggcccctac

SEQ ID NO: 8034 - DNA, 21 bp, Homo sapiens
tgatggacttcctgagacacc

SEQ ID NO: 8035 - DNA, 20 bp, Homo sapiens
tggtgaatttcttggctcac

SEQ ID NO: 8036 - DNA, 20 bp, Homo sapiens
gtgcttccttcctgtctgcc

SEQ ID NO: 8037 - DNA, 20 bp, Homo sapiens
tcgtgctctctttctttcac

SEQ ID NO: 8038 - DNA, 19 bp, Homo sapiens
gtcttctcatccctttgcc

SEQ ID NO: 8039 - DNA, 15 bp, Homo sapiens
gtacttctccgcctc

SEQ ID NO: 8040 - DNA, 18 bp, Homo sapiens
gtgttcaggcatctccac

SEQ ID NO: 8041 - DNA, 19 bp, Homo sapiens
gtgtccttgtcatctccac

SEQ ID NO: 8042 - DNA, 18 bp, Homo sapiens
gtacttcttcatagttct

SEQ ID NO: 8043 - DNA, 17 bp, Homo sapiens
tctgcttctccaccacc

SEQ ID NO: 8044 - DNA, 18 bp, Homo sapiens
tcgtgctttgccttcatc

SEQ ID NO: 8045 - DNA, 17 bp, Homo sapiens
cttcccattgtctccac

SEQ ID NO: 8046 - DNA, 22 bp, Homo sapiens
gtgcttcctcctcccctctgcc

SEQ ID NO: 8047 - DNA, 18 bp, Homo sapiens
tcggcttcttgctccatc

SEQ ID NO: 8048 - DNA, 19 bp, Homo sapiens
gtgcttctttaacattatc

SEQ ID NO: 8049 - DNA, 19 bp, Homo sapiens
gtgcttctgtggcctcatc

SEQ ID NO: 8050 - DNA, 19 bp, Homo sapiens
tctgcttttccacccccac

SEQ ID NO: 8051 - DNA, 18 bp, Homo sapiens
gcttctccagtccctgcc

SEQ ID NO: 8052 - DNA, 22 bp, Homo sapiens
tcctgcttctctatccacagcc

SEQ ID NO: 8053 - DNA, 19 bp, Homo sapiens
gtgcttcttcatgtgcacc

SEQ ID NO: 8054 - DNA, 102 bp, Equine herpesvirus 4
agctgttggccaccagccggttgtcctccacgggcagcgcgcggaacggcgtcgcctcctgcgccttgcgcaccgcctcggtcaccggcaggtggtacagct

SEQ ID NO: 8055 - DNA, 24 bp, Equine herpesvirus 4
agccggttgtcctccacgggcagc

SEQ ID NO: 8056 - DNA, 24 bp, Equine herpesvirus 4
ccttgcgcaccgcctcggtcaccg

SEQ ID NO: 8057 - DNA, 21 bp, Homo sapiens
ccggttgctggcgcgggcggc

SEQ ID NO: 8058 - DNA, 24 bp, Homo sapiens
aactgaaaggcctctacgggcagc

SEQ ID NO: 8059 - DNA, 21 bp, Homo sapiens
agccagcctgtccatgggcag

SEQ ID NO: 8060 - DNA, 23 bp, Homo sapiens
gccctcgctcttccgcgggtagc

SEQ ID NO: 8061 - DNA, 21 bp, Homo sapiens
agcggttgtccttcttccagc

SEQ ID NO: 8062 - DNA, 18 bp, Homo sapiens
gccggtcgcggcgcgggc

SEQ ID NO: 8063 - DNA, 19 bp, Homo sapiens
agctgtctcccgcgggcag

SEQ ID NO: 8064 - DNA, 18 bp, Homo sapiens
agccagttgtcttttcag

SEQ ID NO: 8065 - DNA, 20 bp, Homo sapiens
gcctgccctctgtgggcagc

SEQ ID NO: 8066 - DNA, 24 bp, Homo sapiens
agcaggtggaactctgtgggcagc

SEQ ID NO: 8067 - DNA, 22 bp, Homo sapiens
ccattgctcgcctcggtcgccg

SEQ ID NO: 8068 - DNA, 18 bp, Homo sapiens
ccttgcgcctgcttagcc

SEQ ID NO: 8069 - DNA, 18 bp, Homo sapiens
ccttgcgcgtcgccgccg

SEQ ID NO: 8070 - DNA, 20 bp, Homo sapiens
cttcgcgccgtggcccgccg

SEQ ID NO: 8071 - DNA, 19 bp, Homo sapiens
tgcgaggcctcggtcaccg

SEQ ID NO: 8072 - DNA, 18 bp, Homo sapiens
cttgcgcaccgcggtgcc

SEQ ID NO: 8073 - DNA, 22 bp, Homo sapiens
ccttgcgcgtcccggactaccg

SEQ ID NO: 8074 - DNA, 61 bp, Sesbania mosaic virus
agctcgcagcttgtttggcgacttgagagttaaacactctcgttgccctgctgctgaggct

SEQ ID NO: 8075 - DNA, 24 bp, Sesbania mosaic virus
tctcgttgccctgctgctgaggct

SEQ ID NO: 8076 - DNA, 24 bp, Sesbania mosaic virus
tcgcagcttgtttggcgacttgag

SEQ ID NO: 8077 - DNA, 24 bp, Homo sapiens
tctccactggctgttgctgaggct

SEQ ID NO: 8078 - DNA, 17 bp, Homo sapiens
tctcgttgactctaggg

SEQ ID NO: 8079 - DNA, 19 bp, Homo sapiens
tcgttgccttccagaggct

SEQ ID NO: 8080 - DNA, 19 bp, Homo sapiens
gctgggtgctgctggggct

SEQ ID NO: 8081 - DNA, 64 bp, Sesbania mosaic virus
attgattgagcaactgcagccgggaataatgaagtctggatcttactgcacctcctcaaccaat

SEQ ID NO: 8082 - DNA, 21 bp, Sesbania mosaic virus
tactgcacctcctcaaccaat

SEQ ID NO: 8083 - DNA, 24 bp, Sesbania mosaic virus
gattgagcaactgcagccgggaat

SEQ ID NO: 8084 - DNA, 20 bp, Homo sapiens
ctgcaccccgggcagccaat

SEQ ID NO: 8085 - DNA, 17 bp, Homo sapiens
ctgcacctcttccccaa

SEQ ID NO: 8086 - DNA, 18 bp, Homo sapiens
tactgtacctcctcccca

SEQ ID NO: 8087 - DNA, 18 bp, Homo sapiens
ctgtgaccttcaaccaat

SEQ ID NO: 8088 - DNA, 22 bp, Homo sapiens
cactgcacccagccaggccaat

SEQ ID NO: 8089 - DNA, 21 bp, Homo sapiens
tactgaagagcctcaaccaat

SEQ ID NO: 8090 - DNA, 20 bp, Homo sapiens
tactggcattgccaaccaat

SEQ ID NO: 8091 - DNA, 77 bp, Sesbania mosaic virus
gccacgactcctgaaggcgacctatacgaggtagagttctgctcacacgttattagggctaacaggtgttggttggc

SEQ ID NO: 8092 - DNA, 24 bp, Sesbania mosaic virus
cacacgttattagggctaacaggt

SEQ ID NO: 8093 - DNA, 24 bp, Sesbania mosaic virus
aggcgacctatacgaggtagagtt

SEQ ID NO: 8094 - DNA, 21 bp, Homo sapiens
cacggttattagggcagtggt

SEQ ID NO: 8095 - DNA, 22 bp, Homo sapiens
caggcaagcagggctggcaggt

SEQ ID NO: 8096 - DNA, 87 bp, Fowlpox virus
gccaggtggctagaatcccgcggacaacgtagctgctaacgactacaggcagctacgctcaccggagaaaatacgcccaagcctggc

SEQ ID NO: 8097 - DNA, 24 bp, Fowlpox virus
caccggagaaaatacgcccaagcc

SEQ ID NO: 8098 - DNA, 24 bp, Fowlpox virus
aatcccgcggacaacgtagctgct

SEQ ID NO: 8099 - DNA, 18 bp, Homo sapiens
atctcgttgacacaactg

SEQ ID NO: 8100 - DNA, 20 bp, Homo sapiens
tctcatggactttagctgct

SEQ ID NO: 8101 - DNA, 73 bp, Fowlpox virus
tacgatttaaatattatgtaactctgtatttattcgacactattaatctagtacatacagaatttctttcgta

SEQ ID NO: 8102 - DNA, 24 bp, Fowlpox virus
tagtacatacagaatttctttcgt

SEQ ID NO: 8103 - DNA, 24 bp, Fowlpox virus
tattatgtaactctgtatttattc

SEQ ID NO: 8104 - DNA, 21 bp, Homo sapiens
tagtacataagcatcttttgt

SEQ ID NO: 8105 - DNA, 16 bp, Homo sapiens
tgatacagtttctttc

SEQ ID NO: 8106 - DNA, 93 bp, Fowlpox virus
ctcgccctcttggtcggcgtctcattgccgggtactcgaatcctgcggattacatagctgttaatgaatacacacgcctacgcaccccgcgag

SEQ ID NO: 8107 - DNA, 24 bp, Fowlpox virus
tcttggtcggcgtctcattgccgg

SEQ ID NO: 8108 - DNA, 24 bp, Fowlpox virus
ttacatagctgttaatgaatacac

SEQ ID NO: 8109 - DNA, 23 bp, Homo sapiens
ttacagagtgaaaagtgaataca

SEQ ID NO: 8110 - DNA, 16 bp, Homo sapiens
catgctgctaatatac

SEQ ID NO: 8111 - DNA, 78 bp, Fowlpox virus
tgggtgcctacgacctcatggacggcctagctgttaacgaatagacacacctcggcggtccataagaaagtatgccca

SEQ ID NO: 8112 - DNA, 24 bp, Fowlpox virus
cacacctcggcggtccataagaaa

SEQ ID NO: 8113 - DNA, 24 bp, Fowlpox virus
tcatggacggcctagctgttaacg

SEQ ID NO: 8114 - DNA, 20 bp, Homo sapiens
tcatgaacggtctgggaaca

SEQ ID NO: 8115 - DNA, 123 bp, Fowlpox virus
gattagatatctcttaaccccaatactcatctccttcaatgaaattatagctacgtctatctacagacgcacgaattacataacttaaacggaaagatagtgcggttactagatatccccatc

SEQ ID NO: 8116 - DNA, 24 bp, Fowlpox virus
aatgaaattatagctacgtctatc

SEQ ID NO: 8117 - DNA, 24 bp, Fowlpox virus
tacataacttaaacggaaagatag

SEQ ID NO: 8118 - DNA, 17 bp, Homo sapiens
atgcaattatagctcat

SEQ ID NO: 8119 - DNA, 70 bp, Fowlpox virus
gcccgcccgtcgttacctcaatgtgatatttccagacttcttcaagctaggtcacgcgccaaggttcggc

SEQ ID NO: 8120 - DNA, 19 bp, Fowlpox virus
tcacgcgccaaggttcggc

SEQ ID NO: 8121 - DNA, 24 bp, Fowlpox virus
cgtcgttacctcaatgtgatattt

SEQ ID NO: 8122 - DNA, 22 bp, Homo sapiens
tctcttattcagtgtgatattt

SEQ ID NO: 8123 - DNA, 67 bp, Equine herpesvirus 2
gaacaagagcctgctgtccctgatgttcggaccaatgacctaccagcaggtgacgcacctcaggttc

SEQ ID NO: 8124 - DNA, 24 bp, Equine herpesvirus 2
taccagcaggtgacgcacctcagg

SEQ ID NO: 8125 - DNA, 24 bp, Equine herpesvirus 2
gcctgctgtccctgatgttcggac

SEQ ID NO: 8126 - DNA, 19 bp, Homo sapiens
gcaagtgaattgcctcagg

SEQ ID NO: 8127 - DNA, 15 bp, Homo sapiens
agcaggtgacgtcag

SEQ ID NO: 8128 - DNA, 20 bp, Homo sapiens
accagcaggtgactatcagg

SEQ ID NO: 8129 - DNA, 17 bp, Homo sapiens
ccaacagaacacttcag

SEQ ID NO: 8130 - DNA, 21 bp, Homo sapiens
ccagtgggcaccaacctcagg

SEQ ID NO: 8131 - DNA, 21 bp, Homo sapiens
actggtgggtcacatctcggg

SEQ ID NO: 8132 - DNA, 16 bp, Homo sapiens
ccagcaggtggccgag

SEQ ID NO: 8133 - DNA, 18 bp, Homo sapiens
cactaggtaaacctcagg

SEQ ID NO: 8134 - DNA, 15 bp, Homo sapiens
cagcggggacctcag

SEQ ID NO: 8135 - DNA, 21 bp, Homo sapiens
gcctgctgctctggaacctgg

SEQ ID NO: 8136 - DNA, 20 bp, Homo sapiens
cttctgtccctgttgttggg

SEQ ID NO: 8137 - DNA, 20 bp, Homo sapiens
ctactgtctctgactgcaga

SEQ ID NO: 8138 - DNA, 22 bp, Homo sapiens
acctgctgtttctatcatggac

SEQ ID NO: 8139 - DNA, 18 bp, Homo sapiens
acttgctgtccttggtgt

SEQ ID NO: 8140 - DNA, 20 bp, Homo sapiens
ctgctgtccctgactggtgg

SEQ ID NO: 8141 - DNA, 22 bp, Homo sapiens
gcctgctgtttcatgtcaggac

SEQ ID NO: 8142 - DNA, 18 bp, Homo sapiens
gcctgctgtcctgagaga

SEQ ID NO: 8143 - DNA, 20 bp, Homo sapiens
gcttgctgccctctggtggg

SEQ ID NO: 8144 - DNA, 14 bp, Homo sapiens
ctgctgtccctcgg

SEQ ID NO: 8145 - DNA, 20 bp, Homo sapiens
tgctgtccctggaggaggac

SEQ ID NO: 8146 - DNA, 20 bp, Homo sapiens
ctctgtccctgaggaatgga

SEQ ID NO: 8147 - DNA, 20 bp, Homo sapiens
tgttccttctgatgttcgga

SEQ ID NO: 8148 - DNA, 78 bp, Equine herpesvirus 2
cgggcatggatctctcgcggggtgcgtaggcgtgtgtattcattaacagctatgtaatccgcaggattcgagtacccg

SEQ ID NO: 8149 - DNA, 24 bp, Equine herpesvirus 2
catggatctctcgcggggtgcgta

SEQ ID NO: 8150 - DNA, 24 bp, Equine herpesvirus 2
tatgtaatccgcaggattcgagta

SEQ ID NO: 8151 - DNA, 19 bp, Homo sapiens
tgtaatccccaggaagaat

SEQ ID NO: 8152 - DNA, 77 bp, Equine herpesvirus 2
ggggcatactttctcatggacccccgagttgtgtctattcgttaacagctaggccgtccatgaggtcgtaggcaccc

SEQ ID NO: 8153 - DNA, 17 bp, Equine herpesvirus 2
tgaggtcgtaggcaccc

SEQ ID NO: 8154 - DNA, 24 bp, Equine herpesvirus 2
tcatggacccccgagttgtgtcta

SEQ ID NO: 8155 - DNA, 19 bp, Homo sapiens
tgagatcgtgccactgccc

SEQ ID NO: 8156 - DNA, 18 bp, Homo sapiens
tggggtcacagggcaccc

SEQ ID NO: 8157 - DNA, 18 bp, Homo sapiens
tgaggccgttggcagccc

SEQ ID NO: 8158 - DNA, 19 bp, Homo sapiens
tgggtcgcagcaggtgccc

SEQ ID NO: 8159 - DNA, 19 bp, Homo sapiens
tgaggtcatagcaaagccc

SEQ ID NO: 8160 - DNA, 19 bp, Homo sapiens
tgagatcgtgccacggcac

SEQ ID NO: 8161 - DNA, 18 bp, Homo sapiens
tgaggccaaaagtaggca

SEQ ID NO: 8162 - DNA, 18 bp, Homo sapiens
tgaggtcgacaactgccc

SEQ ID NO: 8163 - DNA, 19 bp, Homo sapiens
tcctggacccctgagtatg

SEQ ID NO: 8164 - DNA, 17 bp, Homo sapiens
tcatggactcctggtgc

SEQ ID NO: 8165 - DNA, 19 bp, Homo sapiens
tcagtggacttttgtgtct

SEQ ID NO: 8166 - DNA, 22 bp, Homo sapiens
ccatggacctctggaaagatct

SEQ ID NO: 8167 - DNA, 23 bp, Homo sapiens
tctggatttttcctgtgtgtcta

SEQ ID NO: 8168 - DNA, 90 bp, Equine herpesvirus 2
gccccaactcctcgccctacctcaagatctatgtggccacgaccgctatctcgcccgtgttcaagccagatgtgggagggcgagggcggc

SEQ ID NO: 8169 - DNA, 18 bp, Equine herpesvirus 2
tgggagggcgagggcggc

SEQ ID NO: 8170 - DNA, 24 bp, Equine herpesvirus 2
tacctcaagatctatgtggccacg

SEQ ID NO: 8171 - DNA, 21 bp, Homo sapiens
tgggaggagctcagaggcggc

SEQ ID NO: 8172 - DNA, 17 bp, Homo sapiens
tggggaggcgaggaggc

SEQ ID NO: 8173 - DNA, 15 bp, Homo sapiens
tgggaggctgggggc

SEQ ID NO: 8174 - DNA, 18 bp, Homo sapiens
tgggaaggcgccacaggc

SEQ ID NO: 8175 - DNA, 16 bp, Homo sapiens
tgggagggggtgcggc

SEQ ID NO: 8176 - DNA, 18 bp, Homo sapiens
tgggagggacacaagggc

SEQ ID NO: 8177 - DNA, 19 bp, Homo sapiens
tgggagggcggccggcggc

SEQ ID NO: 8178 - DNA, 19 bp, Homo sapiens
gggagggtgggagggcggc

SEQ ID NO: 8179 - DNA, 17 bp, Homo sapiens
tgggaggtggagacggc

SEQ ID NO: 8180 - DNA, 18 bp, Homo sapiens
tgggagggagaaggaggc

SEQ ID NO: 8181 - DNA, 18 bp, Homo sapiens
tggtgagggccacacggc

SEQ ID NO: 8182 - DNA, 16 bp, Homo sapiens
tgggagggagggagac

SEQ ID NO: 8183 - DNA, 17 bp, Homo sapiens
tgggagaggagggtggc

SEQ ID NO: 8184 - DNA, 18 bp, Homo sapiens
gggaggaggcagggtggc

SEQ ID NO: 8185 - DNA, 15 bp, Homo sapiens
tgggagaacagcggc

SEQ ID NO: 8186 - DNA, 17 bp, Homo sapiens
tgggagcgccagatggc

SEQ ID NO: 8187 - DNA, 18 bp, Homo sapiens
gggagggcccagcccggc

SEQ ID NO: 8188 - DNA, 16 bp, Homo sapiens
tggggggcgaggatgc

SEQ ID NO: 8189 - DNA, 16 bp, Homo sapiens
tgggaaggcgggaggc

SEQ ID NO: 8190 - DNA, 20 bp, Homo sapiens
tgggagagaagaggggtggc

SEQ ID NO: 8191 - DNA, 16 bp, Homo sapiens
tgggagggatgggggc

SEQ ID NO: 8192 - DNA, 18 bp, Homo sapiens
gggagggtgggactgggc

SEQ ID NO: 8193 - DNA, 19 bp, Homo sapiens
tggaaggggaaacaggtgg

SEQ ID NO: 8194 - DNA, 20 bp, Homo sapiens
tgggtggcgcggagggtggc

SEQ ID NO: 8195 - DNA, 16 bp, Homo sapiens
tgggagggcagggggc

SEQ ID NO: 8196 - DNA, 17 bp, Homo sapiens
tgggaggggggcccggc

SEQ ID NO: 8197 - DNA, 15 bp, Homo sapiens
tgggagggagggaac

SEQ ID NO: 8198 - DNA, 22 bp, Homo sapiens
ggagggcgagaaggaggcggcg

SEQ ID NO: 8199 - DNA, 16 bp, Homo sapiens
tgggtgcgggggcggc

SEQ ID NO: 8200 - DNA, 18 bp, Homo sapiens
tgcgagggaaagggcggc

SEQ ID NO: 8201 - DNA, 19 bp, Homo sapiens
tgggaggggatgaagtggc

SEQ ID NO: 8202 - DNA, 19 bp, Homo sapiens
gggagggcgtgtgggtggc

SEQ ID NO: 8203 - DNA, 25 bp, Homo sapiens
tgggagggatgacaccggggtggcg

SEQ ID NO: 8204 - DNA, 18 bp, Homo sapiens
gggaagcgagagggtggc

SEQ ID NO: 8205 - DNA, 16 bp, Homo sapiens
tgggagaggaggtggc

SEQ ID NO: 8206 - DNA, 21 bp, Homo sapiens
tgggagaggtgagattgcggc

SEQ ID NO: 8207 - DNA, 14 bp, Homo sapiens
tgggaggggggggc

SEQ ID NO: 8208 - DNA, 16 bp, Homo sapiens
tgggaggtcggggggc

SEQ ID NO: 8209 - DNA, 19 bp, Homo sapiens
tggcgagggcgggaggcgg

SEQ ID NO: 8210 - DNA, 17 bp, Homo sapiens
tgggaggagcgaacagc

SEQ ID NO: 8211 - DNA, 17 bp, Homo sapiens
tgggagggagcaggggc

SEQ ID NO: 8212 - DNA, 19 bp, Homo sapiens
gggagggcgcgagagcggc

SEQ ID NO: 8213 - DNA, 16 bp, Homo sapiens
tgggtggcaaggtggc

SEQ ID NO: 8214 - DNA, 16 bp, Homo sapiens
tgggcccgagggcggc

SEQ ID NO: 8215 - DNA, 15 bp, Homo sapiens
tggaagggcagcggc

SEQ ID NO: 8216 - DNA, 18 bp, Homo sapiens
tggggtgggaagggtggc

SEQ ID NO: 8217 - DNA, 18 bp, Homo sapiens
tgggaggatcatcacggc

SEQ ID NO: 8218 - DNA, 17 bp, Homo sapiens
tgggcagcgggggtggc

SEQ ID NO: 8219 - DNA, 16 bp, Homo sapiens
taggaggaggggtggc

SEQ ID NO: 8220 - DNA, 18 bp, Homo sapiens
tgggagggcagcatgggc

SEQ ID NO: 8221 - DNA, 18 bp, Homo sapiens
tgggagggtggcggcggc

SEQ ID NO: 8222 - DNA, 18 bp, Homo sapiens
tgggcagggtgggaaagc

SEQ ID NO: 8223 - DNA, 19 bp, Homo sapiens
tgggaggccgaaagagagc

SEQ ID NO: 8224 - DNA, 17 bp, Homo sapiens
taggagcccagggcggc

SEQ ID NO: 8225 - DNA, 21 bp, Homo sapiens
tgggaagggcatcctggtggc

SEQ ID NO: 8226 - DNA, 15 bp, Homo sapiens
tggcaggagagcggc

SEQ ID NO: 8227 - DNA, 19 bp, Homo sapiens
tgggagggtggatgagggc

SEQ ID NO: 8228 - DNA, 18 bp, Homo sapiens
tgagggggcaagggtggc

SEQ ID NO: 8229 - DNA, 19 bp, Homo sapiens
gggagggcgtgcgggcggc

SEQ ID NO: 8230 - DNA, 18 bp, Homo sapiens
tgcgagggcgcgcgcggc

SEQ ID NO: 8231 - DNA, 17 bp, Homo sapiens
tgagagggcgggagagc

SEQ ID NO: 8232 - DNA, 18 bp, Homo sapiens
tgaggagggcgggggtgg

SEQ ID NO: 8233 - DNA, 20 bp, Homo sapiens
taggaggaggcatgggtggc

SEQ ID NO: 8234 - DNA, 15 bp, Homo sapiens
tgggagagcagcggc

SEQ ID NO: 8235 - DNA, 17 bp, Homo sapiens
tgggggagcgagagggc

SEQ ID NO: 8236 - DNA, 17 bp, Homo sapiens
tggagagggcggggggc

SEQ ID NO: 8237 - DNA, 16 bp, Homo sapiens
tgggagggtgggtggc

SEQ ID NO: 8238 - DNA, 19 bp, Homo sapiens
agggggcagtgggggcggc

SEQ ID NO: 8239 - DNA, 15 bp, Homo sapiens
tgggagggagggagc

SEQ ID NO: 8240 - DNA, 16 bp, Homo sapiens
tgggagacgaggcggc

SEQ ID NO: 8241 - DNA, 20 bp, Homo sapiens
gggagggcgccccgggtggc

SEQ ID NO: 8242 - DNA, 20 bp, Homo sapiens
tgggagggactccccacggc

SEQ ID NO: 8243 - DNA, 21 bp, Homo sapiens
tgggaagggaagaggggcggc

SEQ ID NO: 8244 - DNA, 17 bp, Homo sapiens
tgggacgagagggcggc

SEQ ID NO: 8245 - DNA, 19 bp, Homo sapiens
tgggaggggtgcaaaaggc

SEQ ID NO: 8246 - DNA, 18 bp, Homo sapiens
tgggaggggaggggcggc

SEQ ID NO: 8247 - DNA, 17 bp, Homo sapiens
tgggaggagtgggaggc

SEQ ID NO: 8248 - DNA, 17 bp, Homo sapiens
tgggaggacgacggggc

SEQ ID NO: 8249 - DNA, 20 bp, Homo sapiens
gggacaggacgcgggggcgg

SEQ ID NO: 8250 - DNA, 20 bp, Homo sapiens
gggagaaagaagagggtggc

SEQ ID NO: 8251 - DNA, 19 bp, Homo sapiens
tgggagggatgagaggagc

SEQ ID NO: 8252 - DNA, 17 bp, Homo sapiens
tggcgaggggaagcggc

SEQ ID NO: 8253 - DNA, 18 bp, Homo sapiens
tggggtggcgagggtagc

SEQ ID NO: 8254 - DNA, 20 bp, Homo sapiens
tgggaagggaaggagggcgg

SEQ ID NO: 8255 - DNA, 19 bp, Homo sapiens
tgggaagggtgtgggtggc

SEQ ID NO: 8256 - DNA, 15 bp, Homo sapiens
tgggaggggggcggc

SEQ ID NO: 8257 - DNA, 16 bp, Homo sapiens
tggggaggcagacggc

SEQ ID NO: 8258 - DNA, 19 bp, Homo sapiens
tgggaggggcccagctggc

SEQ ID NO: 8259 - DNA, 18 bp, Homo sapiens
gggagggccccagctggc

SEQ ID NO: 8260 - DNA, 18 bp, Homo sapiens
tgggagggagaggagggc

SEQ ID NO: 8261 - DNA, 18 bp, Homo sapiens
tgggaagggccgggtggc

SEQ ID NO: 8262 - DNA, 20 bp, Homo sapiens
tgaggggcaagaggggcggc

SEQ ID NO: 8263 - DNA, 18 bp, Homo sapiens
gggcgggccgggggcggc

SEQ ID NO: 8264 - DNA, 19 bp, Homo sapiens
tgggaggagtccaaggtgg

SEQ ID NO: 8265 - DNA, 18 bp, Homo sapiens
gggctggctgagggcggc

SEQ ID NO: 8266 - DNA, 18 bp, Homo sapiens
gggaagacagggggcggc

SEQ ID NO: 8267 - DNA, 18 bp, Homo sapiens
ggcaagggcgagggcggc

SEQ ID NO: 8268 - DNA, 18 bp, Homo sapiens
ggggggcctggagggtgg

SEQ ID NO: 8269 - DNA, 17 bp, Homo sapiens
tgggagggcagcccagc

SEQ ID NO: 8270 - DNA, 17 bp, Homo sapiens
tgtgaggcgagggtggc

SEQ ID NO: 8271 - DNA, 17 bp, Homo sapiens
tgggagggggaggcggc

SEQ ID NO: 8272 - DNA, 16 bp, Homo sapiens
tgggagggctgggggc

SEQ ID NO: 8273 - DNA, 17 bp, Homo sapiens
tgggagggtggacaggc

SEQ ID NO: 8274 - DNA, 19 bp, Homo sapiens
tgggcctgacgagggcggc

SEQ ID NO: 8275 - DNA, 17 bp, Homo sapiens
tgggggagcggacaggc

SEQ ID NO: 8276 - DNA, 18 bp, Homo sapiens
cctcatgctatgtggtca

SEQ ID NO: 8277 - DNA, 21 bp, Homo sapiens
ctcgagatccacccggctgcg

SEQ ID NO: 8278 - DNA, 21 bp, Homo sapiens
ctcaagatttattcaggatcg

SEQ ID NO: 8279 - DNA, 18 bp, Homo sapiens
cctcaagatttctttatg

SEQ ID NO: 8280 - DNA, 19 bp, Homo sapiens
cttagaaccaaatgtggcc

SEQ ID NO: 8281 - DNA, 20 bp, Homo sapiens
cctcaagatcacctgctgtg

SEQ ID NO: 8282 - DNA, 18 bp, Homo sapiens
tacctcaaggtattatga

SEQ ID NO: 8283 - DNA, 74 bp, Equine herpesvirus 2
aggatccaggacattatctctggcgtcacggagacgggggaccgagtggatgtcagggacggcacctggaacct

SEQ ID NO: 8284 - DNA, 24 bp, Equine herpesvirus 2
tgtcagggacggcacctggaacct

SEQ ID NO: 8285 - DNA, 24 bp, Equine herpesvirus 2
tatctctggcgtcacggagacggg

SEQ ID NO: 8286 - DNA, 15 bp, Homo sapiens
tgtcaggaacgggga

SEQ ID NO: 8287 - DNA, 21 bp, Homo sapiens
tgtagtaagtacctggggcct

SEQ ID NO: 8288 - DNA, 26 bp, Homo sapiens
gtcagggatggtacctagagatgcct

SEQ ID NO: 8289 - DNA, 14 bp, Homo sapiens
tcagggaccctgga

SEQ ID NO: 8290 - DNA, 22 bp, Homo sapiens
tgttaggagaaaactggaacct

SEQ ID NO: 8291 - DNA, 15 bp, Homo sapiens
tcagggtcctggaac

SEQ ID NO: 8292 - DNA, 18 bp, Homo sapiens
tgtcagggactgtactct

SEQ ID NO: 8293 - DNA, 19 bp, Homo sapiens
tgtcaggggcggcgtgcct

SEQ ID NO: 8294 - DNA, 16 bp, Homo sapiens
gcaaagtggcacctgg

SEQ ID NO: 8295 - DNA, 19 bp, Homo sapiens
agaaaaatacttggaacct

SEQ ID NO: 8296 - DNA, 20 bp, Homo sapiens
tctctggcctcacggtcaag

SEQ ID NO: 8297 - DNA, 19 bp, Homo sapiens
tctctggcgtccggtccag

SEQ ID NO: 8298 - DNA, 22 bp, Homo sapiens
cctttgtgcccacggaggcggg

SEQ ID NO: 8299 - DNA, 89 bp, Equine herpesvirus 2
cagtttgggcatactttcttatggaccgccgaggtgtgtctattcgttaacagctaggccgtccatgaggtcgtaggcacccagtaatg

SEQ ID NO: 8300 - DNA, 24 bp, Equine herpesvirus 2
tgaggtcgtaggcacccagtaatg

SEQ ID NO: 8301 - DNA, 24 bp, Equine herpesvirus 2
tatggaccgccgaggtgtgtctat

SEQ ID NO: 8302 - DNA, 19 bp, Homo sapiens
tgaggtcgtgggcgccgca

SEQ ID NO: 8303 - DNA, 19 bp, Homo sapiens
gaggcagcaggcacctagt

SEQ ID NO: 8304 - DNA, 22 bp, Homo sapiens
tggggtgatacacccagtaatg

SEQ ID NO: 8305 - DNA, 19 bp, Homo sapiens
gggtatatacccagtaatg

SEQ ID NO: 8306 - DNA, 15 bp, Homo sapiens
tggggccgtgtgtct

SEQ ID NO: 8307 - DNA, 20 bp, Homo sapiens
tatgtgctgccgaggtgagc

SEQ ID NO: 8308 - DNA, 87 bp, Equine herpesvirus 2
gccaggcttgggcgtattttctccggtgagcgtagctgcctgtagtcgttagcagctacgttgtccgcgggattctagccacctggc

SEQ ID NO: 8309 - DNA, 24 bp, Equine herpesvirus 2
tacgttgtccgcgggattctagcc

SEQ ID NO: 8310 - DNA, 24 bp, Equine herpesvirus 2
tgggcgtattttctccggtgagcg

SEQ ID NO: 8311 - DNA, 21 bp, Homo sapiens
gcgttcttcgtgtctctagcc

SEQ ID NO: 8312 - DNA, 18 bp, Homo sapiens
gttgtccagaattctggc

SEQ ID NO: 8313 - DNA, 18 bp, Homo sapiens
gttgctgcaagactctag

SEQ ID NO: 8314 - DNA, 25 bp, Homo sapiens
tacattgtttattatggttctagcc

SEQ ID NO: 8315 - DNA, 60 bp, Sulfolobus virus SIRV-2
tagtggaattgtactcccagtgcctttagcaaatgctatattcaacttgctgtctcactg

SEQ ID NO: 8316 - DNA, 20 bp, Sulfolobus virus SIRV-2
ttcaacttgctgtctcactg

SEQ ID NO: 8317 - DNA, 24 bp, Sulfolobus virus SIRV-2
aattgtactcccagtgcctttagc

SEQ ID NO: 8318 - DNA, 17 bp, Homo sapiens
ttcagcttgtctcactg

SEQ ID NO: 8319 - DNA, 21 bp, Homo sapiens
ttcaacctgctgagcaggctg

SEQ ID NO: 8320 - DNA, 14 bp, Homo sapiens
ttcaactcatcact

SEQ ID NO: 8321 - DNA, 14 bp, Homo sapiens
ttcaacctctcact

SEQ ID NO: 8322 - DNA, 18 bp, Homo sapiens
ctcggccctttctcactg

SEQ ID NO: 8323 - DNA, 17 bp, Homo sapiens
ttcactgcgcttcactg

SEQ ID NO: 8324 - DNA, 17 bp, Homo sapiens
ctcaacttgtagtactg

SEQ ID NO: 8325 - DNA, 18 bp, Homo sapiens
ctcagcttgaccccactg

SEQ ID NO: 8326 - DNA, 20 bp, Homo sapiens
ctcaacttgttcccttactg

SEQ ID NO: 8327 - DNA, 20 bp, Homo sapiens
ttcacttttcaacctcactg

SEQ ID NO: 8328 - DNA, 15 bp, Homo sapiens
ttcaaatatctcact

SEQ ID NO: 8329 - DNA, 14 bp, Homo sapiens
tccaacctctcact

SEQ ID NO: 8330 - DNA, 18 bp, Homo sapiens
ttcattcagctctcactg

SEQ ID NO: 8331 - DNA, 20 bp, Homo sapiens
ttcaacctgcatgagggctg

SEQ ID NO: 8332 - DNA, 17 bp, Homo sapiens
ttctgttgctctcactg

SEQ ID NO: 8333 - DNA, 19 bp, Homo sapiens
cttgattcttgtctcactg

SEQ ID NO: 8334 - DNA, 16 bp, Homo sapiens
tgtactccatctttag

SEQ ID NO: 8335 - DNA, 21 bp, Homo sapiens
aattgcacttctgtcctttag

SEQ ID NO: 8336 - DNA, 80 bp, Sulfolobus virus SIRV-2
aatgaatctggaatagtatctacaacattagcagcatttataaaactgtcttttcctactatatctattccaaatttgtt

SEQ ID NO: 8337 - DNA, 24 bp, Sulfolobus virus SIRV-2
tctggaatagtatctacaacatta

SEQ ID NO: 8338 - DNA, 24 bp, Sulfolobus virus SIRV-2
cttttcctactatatctattccaa

SEQ ID NO: 8339 - DNA, 22 bp, Homo sapiens
ctggaatagtggtgtggcatta

SEQ ID NO: 8340 - DNA, 22 bp, Homo sapiens
tctgagtagctctataacatta

SEQ ID NO: 8341 - DNA, 18 bp, Homo sapiens
tctggaatggtgactaca

SEQ ID NO: 8342 - DNA, 70 bp, Sulfolobus virus SIRV-2
atagaacttgatttatttgttgatttgcagttccaataaagcccgcgatataaattggatcttgttctgt

SEQ ID NO: 8343 - DNA, 20 bp, Sulfolobus virus SIRV-2
taaattggatcttgttctgt

SEQ ID NO: 8344 - DNA, 24 bp, Sulfolobus virus SIRV-2
tatttgttgatttgcagttccaat

SEQ ID NO: 8345 - DNA, 19 bp, Homo sapiens
tggatgtgtgctgttctgt

SEQ ID NO: 8346 - DNA, 15 bp, Homo sapiens
aattgggtgttctgt

SEQ ID NO: 8347 - DNA, 18 bp, Homo sapiens
tgggctatcatgttctgt

SEQ ID NO: 8348 - DNA, 18 bp, Homo sapiens
taagttggagtgttctgt

SEQ ID NO: 8349 - DNA, 16 bp, Homo sapiens
aactgttttgttctgt

SEQ ID NO: 8350 - DNA, 23 bp, Homo sapiens
taaattggaaaccaatgttctgt

SEQ ID NO: 8351 - DNA, 18 bp, Homo sapiens
tagattgccttgttctgt

SEQ ID NO: 8352 - DNA, 15 bp, Homo sapiens
taaattggacatctg

SEQ ID NO: 8353 - DNA, 21 bp, Homo sapiens
taaattgaattgtagctctgt

SEQ ID NO: 8354 - DNA, 18 bp, Homo sapiens
tatttgttgattctgcaa

SEQ ID NO: 8355 - DNA, 87 bp, Sulfolobus virus SIRV-2
ataattcatataataaatataatgtatatagtttgttctcatttagatcatttaaaattaaaatatgtcttattgtttatgaattat

SEQ ID NO: 8356 - DNA, 24 bp, Sulfolobus virus SIRV-2
taatgtatatagtttgttctcatt

SEQ ID NO: 8357 - DNA, 24 bp, Sulfolobus virus SIRV-2
atcatttaaaattaaaatatgtct

SEQ ID NO: 8358 - DNA, 20 bp, Homo sapiens
aatgtgtaaatgttctcatt

SEQ ID NO: 8359 - DNA, 21 bp, Homo sapiens
tgtatatagttctgtgtcatt

SEQ ID NO: 8360 - DNA, 18 bp, Homo sapiens
tgagacatggtttgttct

SEQ ID NO: 8361 - DNA, 27 bp, Homo sapiens
taatatatatatatatatgttctcatt

SEQ ID NO: 8362 - DNA, 23 bp, Homo sapiens
taattataatttctgttctcatt

SEQ ID NO: 8363 - DNA, 20 bp, Homo sapiens
taatgtatatcagtttctct

SEQ ID NO: 8364 - DNA, 20 bp, Homo sapiens
gtatatatacctttctcatt

SEQ ID NO: 8365 - DNA, 20 bp, Homo sapiens
taatgtatacagtttgggct

SEQ ID NO: 8366 - DNA, 20 bp, Homo sapiens
tcattttataaaatatgtct

SEQ ID NO: 8367 - DNA, 118 bp, Sulfolobus virus SIRV-2
attgttacctgctgcaagtgtgacgccagccctagaaagcttgttttcacctactcacttcccttgtatgtctgatgaaagcattgcttctacttctcatgttccgctagataacaat

SEQ ID NO: 8368 - DNA, 24 bp, Sulfolobus virus SIRV-2
cagccctagaaagcttgttttcac

SEQ ID NO: 8369 - DNA, 24 bp, Sulfolobus virus SIRV-2
tgatgaaagcattgcttctacttc

SEQ ID NO: 8370 - DNA, 18 bp, Homo sapiens
agccctgggggcctgtcc

SEQ ID NO: 8371 - DNA, 23 bp, Homo sapiens
cagccccagggggctctagccac

SEQ ID NO: 8372 - DNA, 20 bp, Homo sapiens
cagttgctagaacgttttca

SEQ ID NO: 8373 - DNA, 21 bp, Homo sapiens
cagcctagaaagttctagcac

SEQ ID NO: 8374 - DNA, 23 bp, Homo sapiens
caagtctctgagcttgttttcac

SEQ ID NO: 8375 - DNA, 22 bp, Homo sapiens
gcactggaatgtctgttttcac

SEQ ID NO: 8376 - DNA, 19 bp, Homo sapiens
gccccggggggcctgcttc

SEQ ID NO: 8377 - DNA, 19 bp, Homo sapiens
cagccttataaactgtttc

SEQ ID NO: 8378 - DNA, 20 bp, Homo sapiens
aactttagaaagcgaatttt

SEQ ID NO: 8379 - DNA, 22 bp, Homo sapiens
cctggaaggctggcaggttcac

SEQ ID NO: 8380 - DNA, 19 bp, Homo sapiens
cagccctagtaaaagtttt

SEQ ID NO: 8381 - DNA, 18 bp, Homo sapiens
gctttagaaagctaggct

SEQ ID NO: 8382 - DNA, 17 bp, Homo sapiens
cagctctggaaacttgt

SEQ ID NO: 8383 - DNA, 18 bp, Homo sapiens
cagccctaggcgctttca

SEQ ID NO: 8384 - DNA, 18 bp, Homo sapiens
cagtcctgcaggctttca

SEQ ID NO: 8385 - DNA, 19 bp, Homo sapiens
agctctagtccttgttttc

SEQ ID NO: 8386 - DNA, 22 bp, Homo sapiens
agttctagaagcccgcactcac

SEQ ID NO: 8387 - DNA, 18 bp, Homo sapiens
agccctagagaatttttc

SEQ ID NO: 8388 - DNA, 18 bp, Homo sapiens
ccggagagtcgtcctcac

SEQ ID NO: 8389 - DNA, 19 bp, Homo sapiens
tagatctgacttgttttca

SEQ ID NO: 8390 - DNA, 22 bp, Homo sapiens
tgatggtggtccacttctgctt

SEQ ID NO: 8391 - DNA, 18 bp, Homo sapiens
tgatgaaatggctgcttc

SEQ ID NO: 8392 - DNA, 21 bp, Homo sapiens
tgatgaaatacgagctgcttc

SEQ ID NO: 8393 - DNA, 19 bp, Homo sapiens
tggtgaaaggctttgcttc

SEQ ID NO: 8394 - DNA, 69 bp, Sulfolobus virus SIRV-2
tgggctagctaaaagtgaagaaattgaagtataagttacactcatatatttttaataagtaactgccca

SEQ ID NO: 8395 - DNA, 24 bp, Sulfolobus virus SIRV-2
aaagtgaagaaattgaagtataag

SEQ ID NO: 8396 - DNA, 24 bp, Sulfolobus virus SIRV-2
tcatatatttttaataagtaactg

SEQ ID NO: 8397 - DNA, 22 bp, Homo sapiens
aaaatgaagagataaatataag

SEQ ID NO: 8398 - DNA, 19 bp, Homo sapiens
aaaggaagaaatggatgta

SEQ ID NO: 8399 - DNA, 22 bp, Homo sapiens
tcacatatttttaaaagtgctg

SEQ ID NO: 8400 - DNA, 22 bp, Homo sapiens
tcatatatttttaaaaaatact

SEQ ID NO: 8401 - DNA, 68 bp, Sulfolobus virus SIRV-2
caaggcggccaagaggcagacctaagggctctaaaactaaaaagcgccctacatgctctcctgctttg

SEQ ID NO: 8402 - DNA, 24 bp, Sulfolobus virus SIRV-2
agaggcagacctaagggctctaaa

SEQ ID NO: 8403 - DNA, 21 bp, Sulfolobus virus SIRV-2
cctacatgctctcctgctttg

SEQ ID NO: 8404 - DNA, 22 bp, Homo sapiens
agaggtagactcgattatctaa

SEQ ID NO: 8405 - DNA, 18 bp, Homo sapiens
agaggctggtgggctcta

SEQ ID NO: 8406 - DNA, 18 bp, Homo sapiens
agaggcaggctcagctcc

SEQ ID NO: 8407 - DNA, 17 bp, Homo sapiens
agaggcagactcaggac

SEQ ID NO: 8408 - DNA, 18 bp, Homo sapiens
agaggcaggttttaaaag

SEQ ID NO: 8409 - DNA, 17 bp, Homo sapiens
gagggcaggagggctct

SEQ ID NO: 8410 - DNA, 17 bp, Homo sapiens
agaggcaatctaagctc

SEQ ID NO: 8411 - DNA, 20 bp, Homo sapiens
agaggcaagccctcagctct

SEQ ID NO: 8412 - DNA, 18 bp, Homo sapiens
gaggcgggcctaagagtc

SEQ ID NO: 8413 - DNA, 22 bp, Homo sapiens
agaggcagccttggggatatct

SEQ ID NO: 8414 - DNA, 17 bp, Homo sapiens
gaggtaggcctgacgct

SEQ ID NO: 8415 - DNA, 18 bp, Homo sapiens
agatggcacaagggctct

SEQ ID NO: 8416 - DNA, 19 bp, Homo sapiens
gaggcagagactggctcta

SEQ ID NO: 8417 - DNA, 21 bp, Homo sapiens
gatgcggacccaccgggctct

SEQ ID NO: 8418 - DNA, 19 bp, Homo sapiens
agaggcagacctatctggg

SEQ ID NO: 8419 - DNA, 20 bp, Homo sapiens
agggccagcgctgggctcta

SEQ ID NO: 8420 - DNA, 20 bp, Homo sapiens
gaggcagacgctggagggct

SEQ ID NO: 8421 - DNA, 18 bp, Homo sapiens
aaaggcagatttaggatc

SEQ ID NO: 8422 - DNA, 19 bp, Homo sapiens
agaggcaggtcctgggagc

SEQ ID NO: 8423 - DNA, 23 bp, Homo sapiens
agaggcaggactgggacgccaaa

SEQ ID NO: 8424 - DNA, 15 bp, Homo sapiens
agagacaggcttcta

SEQ ID NO: 8425 - DNA, 15 bp, Homo sapiens
agagacagataagct

SEQ ID NO: 8426 - DNA, 16 bp, Homo sapiens
agagacaggccggggc

SEQ ID NO: 8427 - DNA, 19 bp, Homo sapiens
gaggcaggtccaggcccca

SEQ ID NO: 8428 - DNA, 18 bp, Homo sapiens
ggcagagccctgggttct

SEQ ID NO: 8429 - DNA, 14 bp, Homo sapiens
gaggcaagggctct

SEQ ID NO: 8430 - DNA, 21 bp, Homo sapiens
agaggcagacttgaggtctaa

SEQ ID NO: 8431 - DNA, 22 bp, Homo sapiens
agacggcagagaacaggttcta

SEQ ID NO: 8432 - DNA, 21 bp, Homo sapiens
agaggagacagtcggctctaa

SEQ ID NO: 8433 - DNA, 17 bp, Homo sapiens
aggggcaggccaagaac

SEQ ID NO: 8434 - DNA, 18 bp, Homo sapiens
agaggcagagctgggact

SEQ ID NO: 8435 - DNA, 16 bp, Homo sapiens
agaggcaggcatgagc

SEQ ID NO: 8436 - DNA, 17 bp, Homo sapiens
aggcaggagaaggctct

SEQ ID NO: 8437 - DNA, 18 bp, Homo sapiens
agaggcaggcccggggct

SEQ ID NO: 8438 - DNA, 19 bp, Homo sapiens
agaggcaggtctgggaggg

SEQ ID NO: 8439 - DNA, 20 bp, Homo sapiens
gaagcaggctccactctcta

SEQ ID NO: 8440 - DNA, 17 bp, Homo sapiens
aggggcagacctggacc

SEQ ID NO: 8441 - DNA, 19 bp, Homo sapiens
acatgcccttgagggctct

SEQ ID NO: 8442 - DNA, 16 bp, Homo sapiens
ggagccacagggctct

SEQ ID NO: 8443 - DNA, 16 bp, Homo sapiens
aaggtaccagggctct

SEQ ID NO: 8444 - DNA, 18 bp, Homo sapiens
gagggaggccagggctct

SEQ ID NO: 8445 - DNA, 16 bp, Homo sapiens
agaggcagaacctcta

SEQ ID NO: 8446 - DNA, 18 bp, Homo sapiens
cctgatgctctctctctg

SEQ ID NO: 8447 - DNA, 17 bp, Homo sapiens
cctgctgctctcagcct

SEQ ID NO: 8448 - DNA, 18 bp, Homo sapiens
cccactgttcctgctttg

SEQ ID NO: 8449 - DNA, 15 bp, Homo sapiens
acatatcctgctttg

SEQ ID NO: 8450 - DNA, 18 bp, Homo sapiens
catgtggctactgctttg

SEQ ID NO: 8451 - DNA, 15 bp, Homo sapiens
cctacatattgcttt

SEQ ID NO: 8452 - DNA, 16 bp, Homo sapiens
ctagtgctctccacct

SEQ ID NO: 8453 - DNA, 17 bp, Homo sapiens
cctggtgctctcctcct

SEQ ID NO: 8454 - DNA, 18 bp, Homo sapiens
ccttgccgccctgttttg

SEQ ID NO: 8455 - DNA, 19 bp, Homo sapiens
cattaccccttctgctttg

SEQ ID NO: 8456 - DNA, 20 bp, Homo sapiens
ccttgtgcccacttgctttg

SEQ ID NO: 8457 - DNA, 18 bp, Homo sapiens
ccaccaattcctgctttg

SEQ ID NO: 8458 - DNA, 22 bp, Homo sapiens
cccgcatgctctgactcctttg

SEQ ID NO: 8459 - DNA, 20 bp, Homo sapiens
tacatgctcttcccttcctg

SEQ ID NO: 8460 - DNA, 23 bp, Homo sapiens
cccaagcatactttcctgctttg

SEQ ID NO: 8461 - DNA, 20 bp, Homo sapiens
cctgcatgcctcgccctttg

SEQ ID NO: 8462 - DNA, 20 bp, Homo sapiens
catgcacatttcctgctttg

SEQ ID NO: 8463 - DNA, 16 bp, Homo sapiens
cctagctatctgcttt

SEQ ID NO: 8464 - DNA, 18 bp, Homo sapiens
ctgcatgctcttttgctt

SEQ ID NO: 8465 - DNA, 20 bp, Homo sapiens
cctaccttgcccttgctttg

SEQ ID NO: 8466 - DNA, 18 bp, Homo sapiens
ctacatacagctgctttg

SEQ ID NO: 8467 - DNA, 21 bp, Homo sapiens
cctattaaccagcctgctttg

SEQ ID NO: 8468 - DNA, 19 bp, Homo sapiens
ctacatgctcttacattcg

SEQ ID NO: 8469 - DNA, 17 bp, Homo sapiens
ctacttgctgaactttg

SEQ ID NO: 8470 - DNA, 14 bp, Homo sapiens
tacatgcctgcttc

SEQ ID NO: 8471 - DNA, 17 bp, Homo sapiens
ctgcagctctccctcct

SEQ ID NO: 8472 - DNA, 16 bp, Homo sapiens
cctcatgctctcctct

SEQ ID NO: 8473 - DNA, 18 bp, Homo sapiens
ccacagagtcctgctttg

SEQ ID NO: 8474 - DNA, 108 bp, Bovine herpesvirus 4
gtgttgctaatagaatttcatcgaatgactgaatgttgtgtccgatgatgtaaaattctatgaaaattggtttaactttcagactcattatgaggttagtatgttcac

SEQ ID NO: 8475 - DNA, 24 bp, Bovine herpesvirus 4
tgactgaatgttgtgtccgatgat

SEQ ID NO: 8476 - DNA, 24 bp, Bovine herpesvirus 4
tttaactttcagactcattatgag

SEQ ID NO: 8477 - DNA, 21 bp, Homo sapiens
ttaactttcctttattatgag

SEQ ID NO: 8478 - DNA, 17 bp, Homo sapiens
tttgactttcagaccat

SEQ ID NO: 8479 - DNA, 18 bp, Homo sapiens
actttcttccattatgag

SEQ ID NO: 8480 - DNA, 78 bp, Bovine herpesvirus 4
gataaggaagagtttttttgtgttttcattttctcctataggttgaaatggtatagtttcccagaattttcttgtgtc

SEQ ID NO: 8481 - DNA, 24 bp, Bovine herpesvirus 4
taaggaagagtttttttgtgtttt

SEQ ID NO: 8482 - DNA, 24 bp, Bovine herpesvirus 4
tgaaatggtatagtttcccagaat

SEQ ID NO: 8483 - DNA, 22 bp, Homo sapiens
tgaggtggcagctgcccagaat

SEQ ID NO: 8484 - DNA, 15 bp, Homo sapiens
tgaaaggttcccaga

SEQ ID NO: 8485 - DNA, 18 bp, Homo sapiens
tgaaatggtgagttttcc

SEQ ID NO: 8486 - DNA, 21 bp, Homo sapiens
gaatggatggcccaggcccag

SEQ ID NO: 8487 - DNA, 17 bp, Homo sapiens
tgaaatggaaacccaga

SEQ ID NO: 8488 - DNA, 20 bp, Homo sapiens
gagatggtatatggtccaga

SEQ ID NO: 8489 - DNA, 18 bp, Homo sapiens
gagatggaatttcccaga

SEQ ID NO: 8490 - DNA, 20 bp, Homo sapiens
tgaaatgggcctcgtcccag

SEQ ID NO: 8491 - DNA, 124 bp, Bovine herpesvirus 4
atttctcggttttctggtgttaaaattaattttgtgaagtaatctgtgagtgcaaataggatgttatttcttaattttctgaactccgtactaatgaagtttttaactttagaaaaccagaagt

SEQ ID NO: 8492 - DNA, 24 bp, Bovine herpesvirus 4
tgagtgcaaataggatgttatttc

SEQ ID NO: 8493 - DNA, 24 bp, Bovine herpesvirus 4
aactccgtactaatgaagttttta

SEQ ID NO: 8494 - DNA, 19 bp, Homo sapiens
ctctgtaaaggaagttttt

SEQ ID NO: 8495 - DNA, 107 bp, Myxoma virus
gacacatggtggagtttatggagtggtctcaggagctgtcgagcagtaaaaccctgtgtctgcttttaccgaaaattgcccgagacctcaacgtccctccgttggtc

SEQ ID NO: 8496 - DNA, 24 bp, Myxoma virus
tatggagtggtctcaggagctgtc

SEQ ID NO: 8497 - DNA, 24 bp, Myxoma virus
tgcccgagacctcaacgtccctcc

SEQ ID NO: 8498 - DNA, 16 bp, Homo sapiens
ggggtggcggagctgt

SEQ ID NO: 8499 - DNA, 16 bp, Homo sapiens
catggggtgggggctg

SEQ ID NO: 8500 - DNA, 18 bp, Homo sapiens
atggaggataggggctgt

SEQ ID NO: 8501 - DNA, 19 bp, Homo sapiens
tggagtggttatgaaggtc

SEQ ID NO: 8502 - DNA, 19 bp, Homo sapiens
tggggacccgggagctgtc

SEQ ID NO: 8503 - DNA, 19 bp, Homo sapiens
ggggtggtctcaggggagc

SEQ ID NO: 8504 - DNA, 16 bp, Homo sapiens
tgcccgaacctgctct

SEQ ID NO: 8505 - DNA, 18 bp, Homo sapiens
tgcccgagaccgcagtcc

SEQ ID NO: 8506 - DNA, 21 bp, Homo sapiens
gcttaaaacctcagtgtttct

SEQ ID NO: 8507 - DNA, 23 bp, Homo sapiens
gcttgaggtttcagagtccctcc

SEQ ID NO: 8508 - DNA, 19 bp, Homo sapiens
tgccgaggacctgtccctc

SEQ ID NO: 8509 - DNA, 19 bp, Homo sapiens
tgtccaggctctgtccctc

SEQ ID NO: 8510 - DNA, 21 bp, Homo sapiens
tgtccggtacggggtccctcc

SEQ ID NO: 8511 - DNA, 18 bp, Homo sapiens
ccctgagacctcagcacc

SEQ ID NO: 8512 - DNA, 18 bp, Homo sapiens
tgcccagacccctccttc

SEQ ID NO: 8513 - DNA, 24 bp, Homo sapiens
gcctgagacctcgcacaagcctcc

SEQ ID NO: 8514 - DNA, 16 bp, Homo sapiens
tgcccagacctcagcc

SEQ ID NO: 8515 - DNA, 17 bp, Homo sapiens
tgtccgagaccttggtc

SEQ ID NO: 8516 - DNA, 24 bp, Homo sapiens
tgtccgagacctgcagcagcatcc

SEQ ID NO: 8517 - DNA, 63 bp, Myxoma virus
gttgtcacttatcgatacgttcgtcaacgtgatacccgccacgaacatatcgtccctcgcgac

SEQ ID NO: 8518 - DNA, 24 bp, Myxoma virus
tatcgatacgttcgtcaacgtgat

SEQ ID NO: 8519 - DNA, 24 bp, Myxoma virus
ccacgaacatatcgtccctcgcga

SEQ ID NO: 8520 - DNA, 22 bp, Homo sapiens
caggagtatatcgtcaaaacac

SEQ ID NO: 8521 - DNA, 18 bp, Homo sapiens
cgacctcgctccctcgcg

SEQ ID NO: 8522 - DNA, 17 bp, Homo sapiens
gaacgcaggccctcgcg

SEQ ID NO: 8523 - DNA, 23 bp, Homo sapiens
ccacgcgcgctcacaccctcgcg

SEQ ID NO: 8524 - DNA, 117 bp, Myxoma virus
taaaccaatggatgtagttcagataacacgattgtggaagtttcgccttatacggacgcgtgcatagggacaacaccactaacttatccgtacatacgtcaaacactaattggttta

SEQ ID NO: 8525 - DNA, 24 bp, Myxoma virus
tggaagtttcgccttatacggacg

SEQ ID NO: 8526 - DNA, 23 bp, Myxoma virus
tacgtcaaacactaattggttta

SEQ ID NO: 8527 - DNA, 20 bp, Homo sapiens
gtggaacactaaacagattt

SEQ ID NO: 8528 - DNA, 18 bp, Homo sapiens
tacgtcaagcaccaaatg

SEQ ID NO: 8529 - DNA, 81 bp, Myxoma virus
gaggagttaatttttctacggtggcgtgtttaaactgctcaaagtataacatctttccgtaagaaaattgtttatatcctc

SEQ ID NO: 8530 - DNA, 24 bp, Myxoma virus
tctacggtggcgtgtttaaactgc

SEQ ID NO: 8531 - DNA, 24 bp, Myxoma virus
tataacatctttccgtaagaaaat

SEQ ID NO: 8532 - DNA, 20 bp, Homo sapiens
acatcttaaggaaagaaaat

SEQ ID NO: 8533 - DNA, 15 bp, Homo sapiens
acatctgtaagaaaa

SEQ ID NO: 8534 - DNA, 20 bp, Homo sapiens
tataacatcttagagtgaag

SEQ ID NO: 8535 - DNA, 27 bp, Homo sapiens
tataacggttttccatataaggaaaat

SEQ ID NO: 8536 - DNA, 106 bp, Equine herpesvirus 2
ctttttttaccaaacacaattttatttttaaaatgttttacgggttttaaaacagattccctatttaacagtatatcttcaatagaatttccacttacgaaaaaag

SEQ ID NO: 8537 - DNA, 24 bp, Equine herpesvirus 2
tttaacagtatatcttcaatagaa

SEQ ID NO: 8538 - DNA, 24 bp, Equine herpesvirus 2
aattttatttttaaaatgttttac

SEQ ID NO: 8539 - DNA, 19 bp, Homo sapiens
aatttcatttttaaaatgc

SEQ ID NO: 8540 - DNA, 65 bp, Human herpesvirus 5
gcacggactctcgtcgtagcacgttcaaatcggtttattaaagccctcatgctcagactccgtgt

SEQ ID NO: 8541 - DNA, 24 bp, Human herpesvirus 5
actctcgtcgtagcacgttcaaat

SEQ ID NO: 8542 - DNA, 19 bp, Human herpesvirus 5
tcatgctcagactccgtgt

SEQ ID NO: 8543 - DNA, 17 bp, Homo sapiens
tcatgttctctccatgt

SEQ ID NO: 8544 - DNA, 14 bp, Homo sapiens
tcatctcccccgtg

SEQ ID NO: 8545 - DNA, 18 bp, Homo sapiens
tcatgctcagtaccacat

SEQ ID NO: 8546 - DNA, 17 bp, Homo sapiens
tctgctctgccccgtgt

SEQ ID NO: 8547 - DNA, 20 bp, Homo sapiens
tgctcagaaacaccctgtgt

SEQ ID NO: 8548 - DNA, 18 bp, Homo sapiens
tcaggtcagactccgtgt

SEQ ID NO: 8549 - DNA, 83 bp, Human herpesvirus 5
ctgtaccccaccccccttctaaataaatttccgatccctggaggtttccggagtatttgtcccaggagcggggtcctatgcag

SEQ ID NO: 8550 - DNA, 24 bp, Human herpesvirus 5
tttgtcccaggagcggggtcctat

SEQ ID NO: 8551 - DNA, 24 bp, Human herpesvirus 5
tctaaataaatttccgatccctgg

SEQ ID NO: 8552 - DNA, 18 bp, Homo sapiens
tcaaaatgaatttccgat

SEQ ID NO: 8553 - DNA, 17 bp, Homo sapiens
caaataaaaagtccctg

SEQ ID NO: 8554 - DNA, 20 bp, Homo sapiens
caaataaaaccaatttctgg

SEQ ID NO: 8555 - DNA, 65 bp, Ictalurid herpesvirus 1
ttcgtgagctctttttacgactacggggctatggagcccggtagttacttggacaatatcatgag

SEQ ID NO: 8556 - DNA, 24 bp, Ictalurid herpesvirus 1
cccggtagttacttggacaatatc

SEQ ID NO: 8557 - DNA, 24 bp, Ictalurid herpesvirus 1
gctctttttacgactacggggcta

SEQ ID NO: 8558 - DNA, 18 bp, Homo sapiens
gctctttttgcggctgcg

SEQ ID NO: 8559 - DNA, 18 bp, Homo sapiens
tctctttactgactgggg

SEQ ID NO: 8560 - DNA, 17 bp, Homo sapiens
gctcttttgtgaccagg

SEQ ID NO: 8561 - DNA, 14 bp, Homo sapiens
gctctttttggggc

SEQ ID NO: 8562 - DNA, 18 bp, Homo sapiens
gctcattttacgattacg

SEQ ID NO: 8563 - DNA, 90 bp, Ictalurid herpesvirus 1
attgtcaccgtcgatgtgttgctggtgtcgacggtcgtgaacttgacaccgggccgttttattaaagatagcacatcgtttattgacagt

SEQ ID NO: 8564 - DNA, 22 bp, Ictalurid herpesvirus 1
tagcacatcgtttattgacagt

SEQ ID NO: 8565 - DNA, 24 bp, Ictalurid herpesvirus 1
ttgctggtgtcgacggtcgtgaac

SEQ ID NO: 8566 - DNA, 16 bp, Homo sapiens
tagcacattattgcag

SEQ ID NO: 8567 - DNA, 18 bp, Homo sapiens
gccattattattgacagt

SEQ ID NO: 8568 - DNA, 16 bp, Homo sapiens
gcacatcgttctgcag

SEQ ID NO: 8569 - DNA, 18 bp, Homo sapiens
gcatgtgttcactgcagt

SEQ ID NO: 8570 - DNA, 19 bp, Homo sapiens
gctgtcaattattgacagt

SEQ ID NO: 8571 - DNA, 21 bp, Homo sapiens
tagcacatcagtgtaaacagt

SEQ ID NO: 8572 - DNA, 18 bp, Homo sapiens
gcatatttttttgacagt

SEQ ID NO: 8573 - DNA, 19 bp, Homo sapiens
agcgataattattgacagt

SEQ ID NO: 8574 - DNA, 17 bp, Homo sapiens
tagcatagccctgacag

SEQ ID NO: 8575 - DNA, 17 bp, Homo sapiens
gcacatcatttgacagt

SEQ ID NO: 8576 - DNA, 16 bp, Homo sapiens
cagcatgtattgacag

SEQ ID NO: 8577 - DNA, 16 bp, Homo sapiens
gcagtccattgacagt

SEQ ID NO: 8578 - DNA, 87 bp, Ictalurid herpesvirus 1
tcgatgattctttgttcgcaccaggtcctcagcgccgcttaaattcggccgaggaggctcaattggagcgtgacatcgaatctttga

SEQ ID NO: 8579 - DNA, 24 bp, Ictalurid herpesvirus 1
caccaggtcctcagcgccgcttaa

SEQ ID NO: 8580 - DNA, 24 bp, Ictalurid herpesvirus 1
cgaggaggctcaattggagcgtga

SEQ ID NO: 8581 - DNA, 17 bp, Homo sapiens
cgaggaggctgggcctg

SEQ ID NO: 8582 - DNA, 21 bp, Homo sapiens
cggggaggctccgagagtgtg

SEQ ID NO: 8583 - DNA, 19 bp, Homo sapiens
caaggaggcttgactgtga

SEQ ID NO: 8584 - DNA, 18 bp, Homo sapiens
aggaggctcagcctgtga

SEQ ID NO: 8585 - DNA, 18 bp, Homo sapiens
cgggggggctcaggtgga

SEQ ID NO: 8586 - DNA, 19 bp, Homo sapiens
cgaagaggtttcagtgtgg

SEQ ID NO: 8587 - DNA, 21 bp, Homo sapiens
cggggaggcccagagtctgtg

SEQ ID NO: 8588 - DNA, 15 bp, Homo sapiens
gaggaggctgggcgt

SEQ ID NO: 8589 - DNA, 22 bp, Homo sapiens
gaggagtgccacgggagtgtga

SEQ ID NO: 8590 - DNA, 22 bp, Homo sapiens
cgaggaggcgcgggacgcgtga

SEQ ID NO: 8591 - DNA, 80 bp, Ictalurid herpesvirus 1
ccccccgattcccacatgcgtagccgttctagctccgtcgctagcgatcttgggctattgaacctatctgggacgggggg

SEQ ID NO: 8592 - DNA, 24 bp, Ictalurid herpesvirus 1
tagccgttctagctccgtcgctag

SEQ ID NO: 8593 - DNA, 24 bp, Ictalurid herpesvirus 1
tattgaacctatctgggacggggg

SEQ ID NO: 8594 - DNA, 25 bp, Homo sapiens
tattgaacattttcgggggtggggg

SEQ ID NO: 8595 - DNA, 73 bp, Ateline herpesvirus 3
aggtaacccagaactgaaaaaaagatatagtgaaggactagatttagcaatttcaatgtctgaaaatatacct

SEQ ID NO: 8596 - DNA, 24 bp, Ateline herpesvirus 3
tgaaaaaaagatatagtgaaggac

SEQ ID NO: 8597 - DNA, 17 bp, Ateline herpesvirus 3
tgtctgaaaatatacct

SEQ ID NO: 8598 - DNA, 22 bp, Homo sapiens
tgaaaaagaaatagcaacggga

SEQ ID NO: 8599 - DNA, 28 bp, Homo sapiens
taaaaggaggatataactgtctgaagga

SEQ ID NO: 8600 - DNA, 24 bp, Homo sapiens
tgaaaaggaggaggtttgaaggac

SEQ ID NO: 8601 - DNA, 18 bp, Homo sapiens
gagcaaaggcagtgaagg

SEQ ID NO: 8602 - DNA, 21 bp, Homo sapiens
tgggaaaaaaataaagaagga

SEQ ID NO: 8603 - DNA, 16 bp, Homo sapiens
aaaaaagaagagaagg

SEQ ID NO: 8604 - DNA, 20 bp, Homo sapiens
tgaaaaaggatacatgagga

SEQ ID NO: 8605 - DNA, 21 bp, Homo sapiens
tgaaataaaagaccgagggac

SEQ ID NO: 8606 - DNA, 20 bp, Homo sapiens
tgaaaaaaagatatgcaaaa

SEQ ID NO: 8607 - DNA, 19 bp, Homo sapiens
gaaaaaaagatgtagcaaa

SEQ ID NO: 8608 - DNA, 19 bp, Homo sapiens
tgaaaaaaagatgcaatga

SEQ ID NO: 8609 - DNA, 23 bp, Homo sapiens
tgaaagaaagattggtgagcagg

SEQ ID NO: 8610 - DNA, 18 bp, Homo sapiens
aaggcgccagtgaaggac

SEQ ID NO: 8611 - DNA, 21 bp, Homo sapiens
tgaaaaaaaaaaagtgaagga

SEQ ID NO: 8612 - DNA, 20 bp, Homo sapiens
tgaaagaaagcatgtgcagg

SEQ ID NO: 8613 - DNA, 21 bp, Homo sapiens
gaaaaaaatagcaagcgaggg

SEQ ID NO: 8614 - DNA, 19 bp, Homo sapiens
aaaagatggtgagtgaagg

SEQ ID NO: 8615 - DNA, 20 bp, Homo sapiens
tggcaaaaagatgatgaaag

SEQ ID NO: 8616 - DNA, 21 bp, Homo sapiens
taaaagaaagacggtggagga

SEQ ID NO: 8617 - DNA, 15 bp, Homo sapiens
aaaggagtgaaggac

SEQ ID NO: 8618 - DNA, 23 bp, Homo sapiens
tgaacaaaagaccacagggggac

SEQ ID NO: 8619 - DNA, 18 bp, Homo sapiens
aaaaaaatacaaacagga

SEQ ID NO: 8620 - DNA, 17 bp, Homo sapiens
aaaaaaagaagggaagg

SEQ ID NO: 8621 - DNA, 81 bp, Ateline herpesvirus 3
cgtaatatagatgtttgtctaatttagtaaaatcaagagaataaattaatccttttctttttaatacccacatcatattcg

SEQ ID NO: 8622 - DNA, 24 bp, Ateline herpesvirus 3
tagatgtttgtctaatttagtaaa

SEQ ID NO: 8623 - DNA, 24 bp, Ateline herpesvirus 3
ttctttttaatacccacatcatat

SEQ ID NO: 8624 - DNA, 18 bp, Homo sapiens
taggtgttctgtctaatc

SEQ ID NO: 8625 - DNA, 19 bp, Homo sapiens
aatgtttgtctacatgtgt

SEQ ID NO: 8626 - DNA, 19 bp, Homo sapiens
gatgtttgtacttttagta

SEQ ID NO: 8627 - DNA, 21 bp, Homo sapiens
tttttaatccccagctcatat

SEQ ID NO: 8628 - DNA, 60 bp, Ateline herpesvirus 3
aaagctagaaaccgtgcctccatatttagtatatgatacagaagaatggaaattagcttt

SEQ ID NO: 8629 - DNA, 24 bp, Ateline herpesvirus 3
tacagaagaatggaaattagcttt

SEQ ID NO: 8630 - DNA, 24 bp, Ateline herpesvirus 3
aaccgtgcctccatatttagtata

SEQ ID NO: 8631 - DNA, 26 bp, Homo sapiens
cagaagaaatggaaggattcagcttt

SEQ ID NO: 8632 - DNA, 15 bp, Homo sapiens
cagaagaagggttag

SEQ ID NO: 8633 - DNA, 18 bp, Homo sapiens
tacggaagaatggtgatt

SEQ ID NO: 8634 - DNA, 21 bp, Homo sapiens
tacagaattcagattagcttt

SEQ ID NO: 8635 - DNA, 18 bp, Homo sapiens
gaacatggagttagcttt

SEQ ID NO: 8636 - DNA, 19 bp, Homo sapiens
cagaagaatagatggcttt

SEQ ID NO: 8637 - DNA, 18 bp, Homo sapiens
gaaaaataggttagcttt

SEQ ID NO: 8638 - DNA, 71 bp, Ateline herpesvirus 3
acagaataaaagaagcagtcgaggagttaaagcaaattgatttaccggttgcccatctgtctaatttctgt

SEQ ID NO: 8639 - DNA, 24 bp, Ateline herpesvirus 3
tttaccggttgcccatctgtctaa

SEQ ID NO: 8640 - DNA, 24 bp, Ateline herpesvirus 3
aagaagcagtcgaggagttaaagc

SEQ ID NO: 8641 - DNA, 16 bp, Homo sapiens
tttaccagttgtctgt

SEQ ID NO: 8642 - DNA, 66 bp, Ateline herpesvirus 3
tttcatttctaaaataatattcgttttctaattcttttatatggtcattaattttagaaatcgaaa

SEQ ID NO: 8643 - DNA, 24 bp, Ateline herpesvirus 3
tctaaaataatattcgttttctaa

SEQ ID NO: 8644 - DNA, 22 bp, Ateline herpesvirus 3
tcattaattttagaaatcgaaa

SEQ ID NO: 8645 - DNA, 20 bp, Homo sapiens
ctaaaataatatctaactct

SEQ ID NO: 8646 - DNA, 61 bp, Ictalurid herpesvirus 1
ttgtaatatagacatataaatctcttcattaagtgattgtaacatagtatctatattataa

SEQ ID NO: 8647 - DNA, 24 bp, Ictalurid herpesvirus 1
tgattgtaacatagtatctatatt

SEQ ID NO: 8648 - DNA, 24 bp, Ictalurid herpesvirus 1
taatatagacatataaatctcttc

SEQ ID NO: 8649 - DNA, 21 bp, Homo sapiens
attgtaacacaacactatatt

SEQ ID NO: 8650 - DNA, 18 bp, Homo sapiens
caatatagacactttctt

SEQ ID NO: 8651 - DNA, 63 bp, Ictalurid herpesvirus 1
aatctattagatgatatatttcgtataaacacataatggataaaatattatctaatgtagatt

SEQ ID NO: 8652 - DNA, 24 bp, Ictalurid herpesvirus 1
tattagatgatatatttcgtataa

SEQ ID NO: 8653 - DNA, 23 bp, Ictalurid herpesvirus 1
taaaatattatctaatgtagatt

SEQ ID NO: 8654 - DNA, 26 bp, Homo sapiens
tattagatgaatatatacccatataa

SEQ ID NO: 8655 - DNA, 23 bp, Homo sapiens
taaaatatccatctatgtggatt

SEQ ID NO: 8656 - DNA, 23 bp, Homo sapiens
taaaacaacatttaatgtagatt

SEQ ID NO: 8657 - DNA, 18 bp, Homo sapiens
aaatattatctaaggtag

SEQ ID NO: 8658 - DNA, 24 bp, Homo sapiens
taaaatatttctaatgaactgatt

SEQ ID NO: 8659 - DNA, 19 bp, Homo sapiens
aaaatattatctaaaggta

SEQ ID NO: 8660 - DNA, 68 bp, Paramecium bursaria Chlorella virus 1
gtaggtgcttttcagacatccggtgcagattatgcagaaatgatggaatgggaagataagaatcctac

SEQ ID NO: 8661 - DNA, 24 bp, Paramecium bursaria Chlorella virus 1
tggaatgggaagataagaatccta

SEQ ID NO: 8662 - DNA, 24 bp, Paramecium bursaria Chlorella virus 1
aggtgcttttcagacatccggtgc

SEQ ID NO: 8663 - DNA, 16 bp, Homo sapiens
tgggaagaacagtcct

SEQ ID NO: 8664 - DNA, 18 bp, Homo sapiens
tgagatgggaaaattaag

SEQ ID NO: 8665 - DNA, 21 bp, Homo sapiens
tggggtaggaatagggatcct

SEQ ID NO: 8666 - DNA, 22 bp, Homo sapiens
ggaatgggctgcagagaatcct

SEQ ID NO: 8667 - DNA, 19 bp, Homo sapiens
tggaatggggcgatagcct

SEQ ID NO: 8668 - DNA, 20 bp, Homo sapiens
aaaatggggataagaatcct

SEQ ID NO: 8669 - DNA, 20 bp, Homo sapiens
tgggatgggaagatcggtcc

SEQ ID NO: 8670 - DNA, 21 bp, Homo sapiens
ggaatggggcataagagtcct

SEQ ID NO: 8671 - DNA, 20 bp, Homo sapiens
tggaatggcagggtcttcct

SEQ ID NO: 8672 - DNA, 20 bp, Homo sapiens
ggaatgggggactcaggttc

SEQ ID NO: 8673 - DNA, 18 bp, Homo sapiens
tggggtgggaaggaacct

SEQ ID NO: 8674 - DNA, 25 bp, Homo sapiens
gggatgggaagctgatgggatccta

SEQ ID NO: 8675 - DNA, 23 bp, Homo sapiens
ggagtaagatggtaagaattcta

SEQ ID NO: 8676 - DNA, 19 bp, Homo sapiens
ggaagggaggatgacgaac

SEQ ID NO: 8677 - DNA, 77 bp, Chimpanzee cytomegalovirus
tatcgttgtttttatatataaatataattatgaaaaaatatttcaatatttaaaagttatatgttgaaataacagta

SEQ ID NO: 8678 - DNA, 24 bp, Chimpanzee cytomegalovirus
tcgttgtttttatatataaatata

SEQ ID NO: 8679 - DNA, 18 bp, Chimpanzee cytomegalovirus
tatgttgaaataacagta

SEQ ID NO: 8680 - DNA, 18 bp, Homo sapiens
atgcttttaataacagta

SEQ ID NO: 8681 - DNA, 19 bp, Homo sapiens
tatgctaatgataacagta

SEQ ID NO: 8682 - DNA, 18 bp, Homo sapiens
catgctgaaaataacagt

SEQ ID NO: 8683 - DNA, 16 bp, Homo sapiens
tatgttgagaacagta

SEQ ID NO: 8684 - DNA, 18 bp, Homo sapiens
tatgttgaatagtcagta

SEQ ID NO: 8685 - DNA, 66 bp, Chimpanzee cytomegalovirus
tatgtttataataaatattaattaaaatgataaaattataattttttaataattgtaagagacata

SEQ ID NO: 8686 - DNA, 24 bp, Chimpanzee cytomegalovirus
taataaatattaattaaaatgata

SEQ ID NO: 8687 - DNA, 24 bp, Chimpanzee cytomegalovirus
taattttttaataattgtaagaga

SEQ ID NO: 8688 - DNA, 21 bp, Homo sapiens
taactttttaataattaaaag

SEQ ID NO: 8689 - DNA, 107 bp, Chimpanzee cytomegalovirus
attgtatttgatgtattttagatataatgctataataattatatttgatgcattttaaattgtatttgatgtattttaaattgtatttgatgtattttagatataat

SEQ ID NO: 8690 - DNA, 24 bp, Chimpanzee cytomegalovirus
tatttgatgtattttagatataat

SEQ ID NO: 8691 - DNA, 24 bp, Chimpanzee cytomegalovirus
tttgatgtattttaaattgtattt

SEQ ID NO: 8692 - DNA, 23 bp, Homo sapiens
tctgactcttttaaattgtattt

SEQ ID NO: 8693 - DNA, 18 bp, Homo sapiens
tttggtgtatcttaaatc

SEQ ID NO: 8694 - DNA, 86 bp, Variola virus
attatatgattatagtttctatttttacagtaccttgactaaagtctttagtcacacaatactaccaacctacactattatatgat

SEQ ID NO: 8695 - DNA, 24 bp, Variola virus
tatatgattatagtttctattttt

SEQ ID NO: 8696 - DNA, 24 bp, Variola virus
cacacaatactaccaacctacact

SEQ ID NO: 8697 - DNA, 18 bp, Homo sapiens
tatgttattatagtttct

SEQ ID NO: 8698 - DNA, 130 bp, Fowlpox virus
ggataaaaattttttagaaagatataaaaatacttcatcggggtaaatagtaaacataaaaatataaaatattcttttatctatttttgtatgttccattgagtatattaatccttttttttttaattcc

SEQ ID NO: 8699 - DNA, 24 bp, Fowlpox virus
tacttcatcggggtaaatagtaaa

SEQ ID NO: 8700 - DNA, 24 bp, Fowlpox virus
ttccattgagtatattaatccttt

SEQ ID NO: 8701 - DNA, 24 bp, Homo sapiens
ttccttgagtttccaaaatccttt

SEQ ID NO: 8702 - DNA, 70 bp, Fowlpox virus
gtttcataatctattagatgatacgtttcaaataaacacattatagaaattacgttactaatagataaac

SEQ ID NO: 8703 - DNA, 24 bp, Fowlpox virus
atagaaattacgttactaatagat

SEQ ID NO: 8704 - DNA, 24 bp, Fowlpox virus
tctattagatgatacgtttcaaat

SEQ ID NO: 8705 - DNA, 17 bp, Homo sapiens
tattgatgatacacaaa

SEQ ID NO: 8706 - DNA, 22 bp, Homo sapiens
tctatatataaatgtttcaaat

SEQ ID NO: 8707 - DNA, 64 bp, Fowlpox virus
attttaaaatctgccgtgtctagtctcgttattacaggattcctcgcagtttagaatttaaaat

SEQ ID NO: 8708 - DNA, 24 bp, Fowlpox virus
tttaaaatctgccgtgtctagtct

SEQ ID NO: 8709 - DNA, 18 bp, Fowlpox virus
cagtttagaatttaaaat

SEQ ID NO: 8710 - DNA, 19 bp, Homo sapiens
tttaaaatctacccagtct

SEQ ID NO: 8711 - DNA, 26 bp, Homo sapiens
tctaaaatctgttgtgtgcaaatagt

SEQ ID NO: 8712 - DNA, 18 bp, Homo sapiens
tttaaaactgctcagtct

SEQ ID NO: 8713 - DNA, 100 bp, Fowlpox virus
gtcacaaagtgaaagaaccgtatagtttggaacattgttaaattttaaagtagaaactccattaataaagttttcataatccgattcttttacaaaggac

SEQ ID NO: 8714 - DNA, 24 bp, Fowlpox virus
tgaaagaaccgtatagtttggaac

SEQ ID NO: 8715 - DNA, 24 bp, Fowlpox virus
tccattaataaagttttcataatc

SEQ ID NO: 8716 - DNA, 18 bp, Homo sapiens
tccattaatactataatc

SEQ ID NO: 8717 - DNA, 67 bp, Tupaia herpesvirus
gccttccaaactggtgagataattaggaagaagtgggattcattccgaaatccagtttgtgtagggc

SEQ ID NO: 8718 - DNA, 24 bp, Tupaia herpesvirus
tccaaactggtgagataattagga

SEQ ID NO: 8719 - DNA, 24 bp, Tupaia herpesvirus
tccgaaatccagtttgtgtagggc

SEQ ID NO: 8720 - DNA, 19 bp, Homo sapiens
tcctgagtccagttctggg

SEQ ID NO: 8721 - DNA, 19 bp, Homo sapiens
cggagtctagtgtgtaggg

SEQ ID NO: 8722 - DNA, 19 bp, Homo sapiens
aaatccagatcagtggggc

SEQ ID NO: 8723 - DNA, 18 bp, Homo sapiens
gagacccagtctggaggg

SEQ ID NO: 8724 - DNA, 16 bp, Homo sapiens
cgagaccagcctgggg

SEQ ID NO: 8725 - DNA, 90 bp, Tupaia herpesvirus
tgccagtgtttggcagtttttaccgttggttgtgtagaattgggaaagctaatactaaagtgaccgagcatccactgtacaaatgcggca

SEQ ID NO: 8726 - DNA, 24 bp, Tupaia herpesvirus
atactaaagtgaccgagcatccac

SEQ ID NO: 8727 - DNA, 24 bp, Tupaia herpesvirus
agtgtttggcagtttttaccgttg

SEQ ID NO: 8728 - DNA, 23 bp, Homo sapiens
agtgtttggatgcataagtgttg

SEQ ID NO: 8729 - DNA, 74 bp, Tupaia herpesvirus
gcttggcgtttggattgtctattccaatgcaaatagcattggagggtatatatgacaatcttaagagaccaggt

SEQ ID NO: 8730 - DNA, 24 bp, Tupaia herpesvirus
tatgacaatcttaagagaccaggt

SEQ ID NO: 8731 - DNA, 24 bp, Tupaia herpesvirus
cgtttggattgtctattccaatgc

SEQ ID NO: 8732 - DNA, 22 bp, Homo sapiens
gctgtgattgtctgttctgatg

SEQ ID NO: 8733 - DNA, 17 bp, Homo sapiens
gtttggatggttaaatg

SEQ ID NO: 8734 - DNA, 14 bp, Homo sapiens
gtttggatgtcaat

SEQ ID NO: 8735 - DNA, 18 bp, Homo sapiens
catttggattttccgatg

SEQ ID NO: 8736 - DNA, 21 bp, Homo sapiens
gtttggatgaggtcctcaatg

SEQ ID NO: 8737 - DNA, 63 bp, Human herpesvirus 2
agctgggtactataaaaatcaaaccacagataggttatactataattctgaatggggcccgct

SEQ ID NO: 8738 - DNA, 21 bp, Human herpesvirus 2
taattctgaatggggcccgct

SEQ ID NO: 8739 - DNA, 24 bp, Human herpesvirus 2
tactataaaaatcaaaccacagat

SEQ ID NO: 8740 - DNA, 16 bp, Homo sapiens
taatcctgagctccgc

SEQ ID NO: 8741 - DNA, 19 bp, Homo sapiens
taattctaatgccagaggc

SEQ ID NO: 8742 - DNA, 23 bp, Homo sapiens
ttctgaatggtcattagcgggcc

SEQ ID NO: 8743 - DNA, 23 bp, Homo sapiens
ttctgaatggctgttagcgggcc

SEQ ID NO: 8744 - DNA, 16 bp, Homo sapiens
aattctgaatggttag

SEQ ID NO: 8745 - DNA, 18 bp, Homo sapiens
taatcctgagcctatgct

SEQ ID NO: 8746 - DNA, 19 bp, Homo sapiens
caattctgctcaaggcccg

SEQ ID NO: 8747 - DNA, 18 bp, Homo sapiens
taattctgaaggactgct

SEQ ID NO: 8748 - DNA, 21 bp, Homo sapiens
attctgaattctaccctcgct

SEQ ID NO: 8749 - DNA, 16 bp, Homo sapiens
taattctgggggaagc

SEQ ID NO: 8750 - DNA, 75 bp, Human herpesvirus 2
ctcgtaaataaagacgcacagacctcacgcatatagtaccatcacaccgtgtggcgtgtactttattacaacgag

SEQ ID NO: 8751 - DNA, 24 bp, Human herpesvirus 2
tggcgtgtactttattacaacgag

SEQ ID NO: 8752 - DNA, 24 bp, Human herpesvirus 2
taaataaagacgcacagacctcac

SEQ ID NO: 8753 - DNA, 18 bp, Homo sapiens
acgtattactttattgca

SEQ ID NO: 8754 - DNA, 83 bp, Human herpesvirus 4
tgcagatcttttttgtgaaaaaaaaataattatttttttgcgcgccggaataattattttttttgcgcggaaatatttttgca

SEQ ID NO: 8755 - DNA, 24 bp, Human herpesvirus 4
tcttttttgtgaaaaaaaaataat

SEQ ID NO: 8756 - DNA, 20 bp, Human herpesvirus 4
tgcgcggaaatatttttgca

SEQ ID NO: 8757 - DNA, 18 bp, Homo sapiens
tcttttttgtgaaagaaa

SEQ ID NO: 8758 - DNA, 21 bp, Homo sapiens
tcttttttgtgataagaaaat

SEQ ID NO: 8759 - DNA, 18 bp, Homo sapiens
tctttctcacgaagaaaa

SEQ ID NO: 8760 - DNA, 20 bp, Homo sapiens
ttttttgtgaaagtaaaaat

SEQ ID NO: 8761 - DNA, 72 bp, Human herpesvirus 4
ttaaacttattactactgctataggcgttaaacattaaaattattactactgttgtaggcgtcaaagattaa

SEQ ID NO: 8762 - DNA, 20 bp, Human herpesvirus 4
ttgtaggcgtcaaagattaa

SEQ ID NO: 8763 - DNA, 24 bp, Human herpesvirus 4
tactactgctataggcgttaaaca

SEQ ID NO: 8764 - DNA, 18 bp, Homo sapiens
tcccaattgtcaaagatt

SEQ ID NO: 8765 - DNA, 15 bp, Homo sapiens
ttgcaggcgtggatt

SEQ ID NO: 8766 - DNA, 18 bp, Homo sapiens
tgtaggcgtcacccccca

SEQ ID NO: 8767 - DNA, 20 bp, Homo sapiens
tgtcctgaatcaaagattaa

SEQ ID NO: 8768 - DNA, 19 bp, Homo sapiens
ttgtaatatcaaaagatta

SEQ ID NO: 8769 - DNA, 18 bp, Homo sapiens
ttgcaggctcccagatta

SEQ ID NO: 8770 - DNA, 16 bp, Homo sapiens
ttgtagacaaaagatt

SEQ ID NO: 8771 - DNA, 14 bp, Homo sapiens
ctgtaggcgtgatt

SEQ ID NO: 8772 - DNA, 16 bp, Homo sapiens
ttgaggcacaaagatt

SEQ ID NO: 8773 - DNA, 87 bp, Human herpesvirus 4
gcgttaaacattaaaattattactactgctgtaggcgttaaacattattactgctgtaggcgtagctaaattttaatgttttttcgt

SEQ ID NO: 8774 - DNA, 24 bp, Human herpesvirus 4
actgctgtaggcgttaaacattat

SEQ ID NO: 8775 - DNA, 24 bp, Human herpesvirus 4
actgctgtaggcgtagctaaattt

SEQ ID NO: 8776 - DNA, 18 bp, Homo sapiens
actattgtaggaacatta

SEQ ID NO: 8777 - DNA, 81 bp, Human herpesvirus 4
ggcattcctgatattcatgttaaagtgctatactataaccatcttatgtgggctctttatacatcttattggcaggaggcc

SEQ ID NO: 8778 - DNA, 24 bp, Human herpesvirus 4
taaagtgctatactataaccatct

SEQ ID NO: 8779 - DNA, 24 bp, Human herpesvirus 4
ctctttatacatcttattggcagg

SEQ ID NO: 8780 - DNA, 19 bp, Homo sapiens
taaaatgctacaaaactat

SEQ ID NO: 8781 - DNA, 25 bp, Homo sapiens
caaagtgctgtaacagtgaccatct

SEQ ID NO: 8782 - DNA, 18 bp, Homo sapiens
aagtgctatatttccaac

SEQ ID NO: 8783 - DNA, 15 bp, Homo sapiens
aaatgctacaaccat

SEQ ID NO: 8784 - DNA, 22 bp, Homo sapiens
aagtgctatctacggactatct

SEQ ID NO: 8785 - DNA, 23 bp, Homo sapiens
agtactatattccaaccctatct

SEQ ID NO: 8786 - DNA, 20 bp, Homo sapiens
taaagtgccattaaggaacc

SEQ ID NO: 8787 - DNA, 125 bp, Fowlpox virus
tccctggtagctactgagcagcagctgtttaacaggcccttttggctgcagagatcccagggccataacaatggcatactgtggcacaacgaggcctttgtaacattggttgacactaccagggg

SEQ ID NO: 8788 - DNA, 24 bp, Fowlpox virus
tggcacaacgaggcctttgtaaca

SEQ ID NO: 8789 - DNA, 24 bp, Fowlpox virus
gagcagcagctgtttaacaggccc

SEQ ID NO: 8790 - DNA, 18 bp, Homo sapiens
gcaggtgaggctgtaaca

SEQ ID NO: 8791 - DNA, 18 bp, Homo sapiens
tggcgtaacgagacttta

SEQ ID NO: 8792 - DNA, 20 bp, Homo sapiens
ggcagccggcctttgtgaca

SEQ ID NO: 8793 - DNA, 15 bp, Homo sapiens
gccatgacctttgta

SEQ ID NO: 8794 - DNA, 20 bp, Homo sapiens
tggcacaacagggcttcaca

SEQ ID NO: 8795 - DNA, 22 bp, Homo sapiens
gagcagcaggagcagcgggtcc

SEQ ID NO: 8796 - DNA, 17 bp, Homo sapiens
gcagcagctctcgggcc

SEQ ID NO: 8797 - DNA, 20 bp, Homo sapiens
gagagcagccaaggggcagg

SEQ ID NO: 8798 - DNA, 15 bp, Homo sapiens
agcagcagctcaggc

SEQ ID NO: 8799 - DNA, 22 bp, Homo sapiens
gagcagcagcggcgtctcaggc

SEQ ID NO: 8800 - DNA, 16 bp, Homo sapiens
gcagcagctcccgggc

SEQ ID NO: 8801 - DNA, 17 bp, Homo sapiens
acagcagctggaaggcc

SEQ ID NO: 8802 - DNA, 15 bp, Homo sapiens
gcggcaacacaggcc

SEQ ID NO: 8803 - DNA, 23 bp, Homo sapiens
agcagcagtcacctagtaggtcc

SEQ ID NO: 8804 - DNA, 19 bp, Homo sapiens
gcagcagctcccgacaggc

SEQ ID NO: 8805 - DNA, 18 bp, Homo sapiens
gagcagccagcacaggcc

SEQ ID NO: 8806 - DNA, 20 bp, Homo sapiens
agcagctggtcaggatgggc

SEQ ID NO: 8807 - DNA, 19 bp, Homo sapiens
ggcggcagccgctgcgggc

SEQ ID NO: 8808 - DNA, 21 bp, Homo sapiens
agcagccaccgggtttagcgg

SEQ ID NO: 8809 - DNA, 16 bp, Homo sapiens
cagcagctgtggtccc

SEQ ID NO: 8810 - DNA, 23 bp, Homo sapiens
gagcagcagccatcgtggcaggc

SEQ ID NO: 8811 - DNA, 17 bp, Homo sapiens
gcagcagctgccaggcc

SEQ ID NO: 8812 - DNA, 20 bp, Homo sapiens
gcagctgctggatggggccc

SEQ ID NO: 8813 - DNA, 21 bp, Homo sapiens
gagcagtgctgttcacagccc

SEQ ID NO: 8814 - DNA, 19 bp, Homo sapiens
gccgcagccgcgcgggtcc

SEQ ID NO: 8815 - DNA, 19 bp, Homo sapiens
aagcagcagcctggtgggc

SEQ ID NO: 8816 - DNA, 16 bp, Homo sapiens
aagcagcagctgtggc

SEQ ID NO: 8817 - DNA, 16 bp, Homo sapiens
gagagcagccataggc

SEQ ID NO: 8818 - DNA, 20 bp, Homo sapiens
acagcagcaaaccaacaggc

SEQ ID NO: 8819 - DNA, 20 bp, Homo sapiens
gcagcagcccccacgggccc

SEQ ID NO: 8820 - DNA, 20 bp, Homo sapiens
gcagcagtgggcacaggccc

SEQ ID NO: 8821 - DNA, 18 bp, Homo sapiens
gcagcagcggctcaggcc

SEQ ID NO: 8822 - DNA, 21 bp, Homo sapiens
gccggcggctgacacaggccc

SEQ ID NO: 8823 - DNA, 19 bp, Homo sapiens
gagcagcagatgaagggcc

SEQ ID NO: 8824 - DNA, 16 bp, Homo sapiens
gagcaacagaacaggc

SEQ ID NO: 8825 - DNA, 19 bp, Homo sapiens
gagcagccagctgcaggcc

SEQ ID NO: 8826 - DNA, 21 bp, Homo sapiens
gcagcagctgtcacacgggcc

SEQ ID NO: 8827 - DNA, 18 bp, Homo sapiens
gcagcagctgccacaggc

SEQ ID NO: 8828 - DNA, 16 bp, Homo sapiens
gagaagcagctgaggc

SEQ ID NO: 8829 - DNA, 102 bp, Fowlpox virus
cgaattgctggtattgtggtgcggtgtcctcgacggtccatgtgtcatcttataatcacttggtcagtccagggtacaccactccattatctatttacttcg

SEQ ID NO: 8830 - DNA, 24 bp, Fowlpox virus
tacaccactccattatctatttac

SEQ ID NO: 8831 - DNA, 24 bp, Fowlpox virus
tggtattgtggtgcggtgtcctcg

SEQ ID NO: 8832 - DNA, 21 bp, Homo sapiens
tgaccactccattcatattta

SEQ ID NO: 8833 - DNA, 14 bp, Homo sapiens
tacaccatctattt

SEQ ID NO: 8834 - DNA, 15 bp, Homo sapiens
cacttcatctattta

SEQ ID NO: 8835 - DNA, 21 bp, Homo sapiens
caccacctgttatctgtttac

SEQ ID NO: 8836 - DNA, 21 bp, Homo sapiens
cacaccactttatttcaacct

SEQ ID NO: 8837 - DNA, 69 bp, Gallid herpesvirus 2
gccgtcaccgtgtcgcagctcttccccggcctcctcctgctggcctactgcgagagccaccgcgccggc

SEQ ID NO: 8838 - DNA, 24 bp, Gallid herpesvirus 2
tcgcagctcttccccggcctcctc

SEQ ID NO: 8839 - DNA, 21 bp, Gallid herpesvirus 2
tgcgagagccaccgcgccggc

SEQ ID NO: 8840 - DNA, 19 bp, Homo sapiens
gcgtggccgccggcctcct

SEQ ID NO: 8841 - DNA, 19 bp, Homo sapiens
ccgcagctctttccccctc

SEQ ID NO: 8842 - DNA, 19 bp, Homo sapiens
tcgggcacgtcggcctcct

SEQ ID NO: 8843 - DNA, 18 bp, Homo sapiens
gctcttccctttcttctc

SEQ ID NO: 8844 - DNA, 27 bp, Homo sapiens
tcgcagctcctcctccccaggctcttc

SEQ ID NO: 8845 - DNA, 19 bp, Homo sapiens
gcagctctttcctagctct

SEQ ID NO: 8846 - DNA, 19 bp, Homo sapiens
gcagcctccgcttggcttc

SEQ ID NO: 8847 - DNA, 23 bp, Homo sapiens
tcgatggccgagtcggcctcctc

SEQ ID NO: 8848 - DNA, 18 bp, Homo sapiens
ccgcggctcttcctcctc

SEQ ID NO: 8849 - DNA, 22 bp, Homo sapiens
ccgcgtcctcctcggcctcctc

SEQ ID NO: 8850 - DNA, 19 bp, Homo sapiens
gcagctctctctgctcctc

SEQ ID NO: 8851 - DNA, 17 bp, Homo sapiens
tgctagcggcgcgccgg

SEQ ID NO: 8852 - DNA, 21 bp, Homo sapiens
tgcagaggctcccgcgccggc

SEQ ID NO: 8853 - DNA, 21 bp, Homo sapiens
gcgagagccaccacgcccggc

SEQ ID NO: 8854 - DNA, 21 bp, Homo sapiens
gcgggccgcagctgcgccggc

SEQ ID NO: 8855 - DNA, 18 bp, Homo sapiens
gagcggccgccgcgccgg

SEQ ID NO: 8856 - DNA, 16 bp, Homo sapiens
tgcgagagcaccgagg

SEQ ID NO: 8857 - DNA, 19 bp, Homo sapiens
tgcgagagctaccgaaagc

SEQ ID NO: 8858 - DNA, 17 bp, Homo sapiens
gcgagcgacgcgccggc

SEQ ID NO: 8859 - DNA, 20 bp, Homo sapiens
gccccggccgccgcgccggc

SEQ ID NO: 8860 - DNA, 20 bp, Homo sapiens
gcgagggcgagggcgccggc

SEQ ID NO: 8861 - DNA, 26 bp, Homo sapiens
tgcgagagctctttgtgccggcgcgg

SEQ ID NO: 8862 - DNA, 21 bp, Homo sapiens
tgcgggcaggtgcgcgccggc

SEQ ID NO: 8863 - DNA, 19 bp, Homo sapiens
tgcgagcgccagcaccggc

SEQ ID NO: 8864 - DNA, 20 bp, Homo sapiens
tgcaggagccaccacctggc

SEQ ID NO: 8865 - DNA, 18 bp, Homo sapiens
tgcagacaaggcgccggc

SEQ ID NO: 8866 - DNA, 22 bp, Homo sapiens
tgcgagaactgccacacactgg

SEQ ID NO: 8867 - DNA, 21 bp, Homo sapiens
gctcccagccgccgcgccggc

SEQ ID NO: 8868 - DNA, 20 bp, Homo sapiens
gcctcccccgccgcgccggc

SEQ ID NO: 8869 - DNA, 15 bp, Homo sapiens
tgcgagaggcggcgg

SEQ ID NO: 8870 - DNA, 21 bp, Homo sapiens
tgcaggagctgcgcgtagggc

SEQ ID NO: 8871 - DNA, 17 bp, Homo sapiens
gcgagagctggcccggc

SEQ ID NO: 8872 - DNA, 17 bp, Homo sapiens
tggagagctgcgccggc

SEQ ID NO: 8873 - DNA, 18 bp, Homo sapiens
cgcggtcgccgcgccggc

SEQ ID NO: 8874 - DNA, 20 bp, Homo sapiens
tgtgagagccagcactccgg

SEQ ID NO: 8875 - DNA, 19 bp, Homo sapiens
tacgagagcggcagttggc

SEQ ID NO: 8876 - DNA, 17 bp, Homo sapiens
gcggggcccgcgccggc

SEQ ID NO: 8877 - DNA, 17 bp, Homo sapiens
gcagagcctgcgccggc

SEQ ID NO: 8878 - DNA, 16 bp, Homo sapiens
tgcagggccacaccgg

SEQ ID NO: 8879 - DNA, 23 bp, Homo sapiens
tgcgagagcctggtgccggcgcg

SEQ ID NO: 8880 - DNA, 21 bp, Homo sapiens
tgcgtgagccaccacacctgg

SEQ ID NO: 8881 - DNA, 17 bp, Homo sapiens
gcggggagcgcgctggc

SEQ ID NO: 8882 - DNA, 19 bp, Homo sapiens
tgcgagagtcagccttggc

SEQ ID NO: 8883 - DNA, 79 bp, Rat cytomegalovirus
gcgtctccggtcccgatcgaccggtcgccccgtcgcattgttcgacgcgggcgagcgtgcgcgggatccccggcgacgc

SEQ ID NO: 8884 - DNA, 24 bp, Rat cytomegalovirus
gcgagcgtgcgcgggatccccggc

SEQ ID NO: 8885 - DNA, 24 bp, Rat cytomegalovirus
tctccggtcccgatcgaccggtcg

SEQ ID NO: 8886 - DNA, 23 bp, Homo sapiens
gcggggtggcagcggtccccggc

SEQ ID NO: 8887 - DNA, 23 bp, Homo sapiens
gcgcagcgctgcggatccccggc

SEQ ID NO: 8888 - DNA, 21 bp, Homo sapiens
gctggcgtccgggtccccggc

SEQ ID NO: 8889 - DNA, 19 bp, Homo sapiens
gaggtatgaggatccctgg

SEQ ID NO: 8890 - DNA, 24 bp, Homo sapiens
cgggcgtgtgcccgcgtccccggc

SEQ ID NO: 8891 - DNA, 20 bp, Homo sapiens
gcgggcggcgcggcgaccgg

SEQ ID NO: 8892 - DNA, 17 bp, Homo sapiens
gaccgtgcgccccccgg

SEQ ID NO: 8893 - DNA, 18 bp, Homo sapiens
gcgagtgtgtgcgcccgg

SEQ ID NO: 8894 - DNA, 21 bp, Homo sapiens
gcggcccccggggtccccggc

SEQ ID NO: 8895 - DNA, 16 bp, Homo sapiens
gagcgtgtgaccccgg

SEQ ID NO: 8896 - DNA, 20 bp, Homo sapiens
gcgggcgggcgtggggccgg

SEQ ID NO: 8897 - DNA, 19 bp, Homo sapiens
gcgggcggagaatccccgg

SEQ ID NO: 8898 - DNA, 16 bp, Homo sapiens
gcagcgtgcgttcctg

SEQ ID NO: 8899 - DNA, 16 bp, Homo sapiens
gcgaggtgcgctcccg

SEQ ID NO: 8900 - DNA, 22 bp, Homo sapiens
gcgagcggcgcggggaggcggc

SEQ ID NO: 8901 - DNA, 81 bp, Rat cytomegalovirus
tcccgggcgctgacgccgccgacgacatcagacgagcggatctccggtcgttctttcgtcgggagaagaagcgagccggga

SEQ ID NO: 8902 - DNA, 24 bp, Rat cytomegalovirus
gtcgttctttcgtcgggagaagaa

SEQ ID NO: 8903 - DNA, 24 bp, Rat cytomegalovirus
acgacatcagacgagcggatctcc

SEQ ID NO: 8904 - DNA, 17 bp, Homo sapiens
gtcttctttcgtaagaa

SEQ ID NO: 8905 - DNA, 20 bp, Homo sapiens
gttccttcgtccattaggga

SEQ ID NO: 8906 - DNA, 20 bp, Homo sapiens
gttctttttttaaaagaaga

SEQ ID NO: 8907 - DNA, 20 bp, Homo sapiens
gtccttttttatgaggagaa

SEQ ID NO: 8908 - DNA, 16 bp, Homo sapiens
gtcttctttcggagag

SEQ ID NO: 8909 - DNA, 18 bp, Homo sapiens
gttctttcttctctagaa

SEQ ID NO: 8910 - DNA, 18 bp, Homo sapiens
gttccttcgggaggagaa

SEQ ID NO: 8911 - DNA, 23 bp, Homo sapiens
gttgttctttcaaaaaagaagaa

SEQ ID NO: 8912 - DNA, 16 bp, Homo sapiens
gttctttaggaggaga

SEQ ID NO: 8913 - DNA, 63 bp, Monkeypox virus
cggaggaggcagacagacggcaggcggccggccgggcaccggctgcaaccctctcctcttctg

SEQ ID NO: 8914 - DNA, 24 bp, Monkeypox virus
aggcagacagacggcaggcggccg

SEQ ID NO: 8915 - DNA, 22 bp, Monkeypox virus
gctgcaaccctctcctcttctg

SEQ ID NO: 8916 - DNA, 17 bp, Homo sapiens
ggcagcgggtgggcgcc

SEQ ID NO: 8917 - DNA, 16 bp, Homo sapiens
aggcaggcgggggcgg

SEQ ID NO: 8918 - DNA, 21 bp, Homo sapiens
ggcaggcaggcgtgcaggtgg

SEQ ID NO: 8919 - DNA, 21 bp, Homo sapiens
aggtcgacggtcaggcggccg

SEQ ID NO: 8920 - DNA, 18 bp, Homo sapiens
agcagacaacacagtggc

SEQ ID NO: 8921 - DNA, 18 bp, Homo sapiens
agacagacaggtggcagg

SEQ ID NO: 8922 - DNA, 16 bp, Homo sapiens
aggcagcaggcgaggc

SEQ ID NO: 8923 - DNA, 20 bp, Homo sapiens
ggagggtgggagggcggccg

SEQ ID NO: 8924 - DNA, 19 bp, Homo sapiens
gcagacagcgcggcggccg

SEQ ID NO: 8925 - DNA, 22 bp, Homo sapiens
gcaggggccgggcgggcggccg

SEQ ID NO: 8926 - DNA, 19 bp, Homo sapiens
ggcgcaggcgggcgcggcc

SEQ ID NO: 8927 - DNA, 21 bp, Homo sapiens
ggcagagggggcaggcggccg

SEQ ID NO: 8928 - DNA, 21 bp, Homo sapiens
ggcgggacgggcgggcagccg

SEQ ID NO: 8929 - DNA, 19 bp, Homo sapiens
aggcgcgcagacggcagac

SEQ ID NO: 8930 - DNA, 20 bp, Homo sapiens
ggcggctggactggcggccg

SEQ ID NO: 8931 - DNA, 19 bp, Homo sapiens
ggcggcgggcgggcggccg

SEQ ID NO: 8932 - DNA, 21 bp, Homo sapiens
ggcagcctcagggcaggcggc

SEQ ID NO: 8933 - DNA, 19 bp, Homo sapiens
ggcgcaggcggcggcggcc

SEQ ID NO: 8934 - DNA, 18 bp, Homo sapiens
ggcaggcaggtgcagggc

SEQ ID NO: 8935 - DNA, 22 bp, Homo sapiens
ggctggcaggcggggcgggccg

SEQ ID NO: 8936 - DNA, 19 bp, Homo sapiens
agcaggcgggtctggcggc

SEQ ID NO: 8937 - DNA, 15 bp, Homo sapiens
ggcaggcaggctggc

SEQ ID NO: 8938 - DNA, 16 bp, Homo sapiens
ggcgggcaggcggccg

SEQ ID NO: 8939 - DNA, 20 bp, Homo sapiens
aggcggcgggcaggcggccg

SEQ ID NO: 8940 - DNA, 18 bp, Homo sapiens
aggcaggcggaggcggcc

SEQ ID NO: 8941 - DNA, 21 bp, Homo sapiens
aggcggcgggagcggcggccg

SEQ ID NO: 8942 - DNA, 17 bp, Homo sapiens
ggtgacaggcggcggcg

SEQ ID NO: 8943 - DNA, 26 bp, Homo sapiens
aggcaggcaggcaggcaggcaggccg

SEQ ID NO: 8944 - DNA, 18 bp, Homo sapiens
aggcagacaggcaggcag

SEQ ID NO: 8945 - DNA, 18 bp, Homo sapiens
aggcaggcaggcaggcag

SEQ ID NO: 8946 - DNA, 16 bp, Homo sapiens
aggcggagggagcggc

SEQ ID NO: 8947 - DNA, 17 bp, Homo sapiens
ggcaggtgggaggcagc

SEQ ID NO: 8948 - DNA, 15 bp, Homo sapiens
ggcaggcagcggggc

SEQ ID NO: 8949 - DNA, 17 bp, Homo sapiens
ggcagccgggaagcggc

SEQ ID NO: 8950 - DNA, 18 bp, Homo sapiens
aggagactgcaggcggcc

SEQ ID NO: 8951 - DNA, 18 bp, Homo sapiens
aggggacagacagcggcc

SEQ ID NO: 8952 - DNA, 20 bp, Homo sapiens
ggcagacagcaacgggcggc

SEQ ID NO: 8953 - DNA, 27 bp, Homo sapiens
ggcagacagaggtgggcggccgcctgc

SEQ ID NO: 8954 - DNA, 20 bp, Homo sapiens
ggcaagacagacggcagacg

SEQ ID NO: 8955 - DNA, 17 bp, Homo sapiens
ggcaggcgggcaggcgg

SEQ ID NO: 8956 - DNA, 16 bp, Homo sapiens
ggcaggcgggcggccg

SEQ ID NO: 8957 - DNA, 17 bp, Homo sapiens
ggcgggcggcggcggcc

SEQ ID NO: 8958 - DNA, 14 bp, Homo sapiens
ggcaggcggcggcc

SEQ ID NO: 8959 - DNA, 18 bp, Homo sapiens
ggcgcagacgggcggcca

SEQ ID NO: 8960 - DNA, 16 bp, Homo sapiens
ggcagacaggagcggc

SEQ ID NO: 8961 - DNA, 18 bp, Homo sapiens
ggcagcccgcaggcggcc

SEQ ID NO: 8962 - DNA, 19 bp, Homo sapiens
gggaaagggcgggcggccg

SEQ ID NO: 8963 - DNA, 17 bp, Homo sapiens
aggcagcgggcggcggc

SEQ ID NO: 8964 - DNA, 22 bp, Homo sapiens
agcagacagagcaaagtggccg

SEQ ID NO: 8965 - DNA, 21 bp, Homo sapiens
ggctgaaggggcgggcggccg

SEQ ID NO: 8966 - DNA, 21 bp, Homo sapiens
aggcgggcagatggacagacg

SEQ ID NO: 8967 - DNA, 18 bp, Homo sapiens
aggcaggtgggcaggcgg

SEQ ID NO: 8968 - DNA, 18 bp, Homo sapiens
ggcaggcaggggagaggc

SEQ ID NO: 8969 - DNA, 21 bp, Homo sapiens
aggccggcgtcggggcggccg

SEQ ID NO: 8970 - DNA, 15 bp, Homo sapiens
ggcaggcagggggcc

SEQ ID NO: 8971 - DNA, 19 bp, Homo sapiens
ggcgggcgggcggcggccg

SEQ ID NO: 8972 - DNA, 17 bp, Homo sapiens
aggcagacagatgcagg

SEQ ID NO: 8973 - DNA, 16 bp, Homo sapiens
agcagacgggagtggc

SEQ ID NO: 8974 - DNA, 17 bp, Homo sapiens
gggggacagacgggggc

SEQ ID NO: 8975 - DNA, 17 bp, Homo sapiens
aggcagataggcgggcg

SEQ ID NO: 8976 - DNA, 18 bp, Homo sapiens
ggcaggcggcgggggccg

SEQ ID NO: 8977 - DNA, 20 bp, Homo sapiens
ggcaggcggcaagcgggccg

SEQ ID NO: 8978 - DNA, 19 bp, Homo sapiens
ggcggcagacggcgggcgg

SEQ ID NO: 8979 - DNA, 18 bp, Homo sapiens
ggtggacaggcaggagcc

SEQ ID NO: 8980 - DNA, 22 bp, Homo sapiens
aggtagagactccccaggcggc

SEQ ID NO: 8981 - DNA, 18 bp, Homo sapiens
ggcaggcagaggagccag

SEQ ID NO: 8982 - DNA, 22 bp, Homo sapiens
ggcaggcaggggccaggggccg

SEQ ID NO: 8983 - DNA, 19 bp, Homo sapiens
ggcgggcgggcggcggcca

SEQ ID NO: 8984 - DNA, 19 bp, Homo sapiens
ggcgcgcagacggtggaag

SEQ ID NO: 8985 - DNA, 21 bp, Homo sapiens
aggcaggcaggaggcattacg

SEQ ID NO: 8986 - DNA, 18 bp, Homo sapiens
ggcgggcaggcggaggcg

SEQ ID NO: 8987 - DNA, 18 bp, Homo sapiens
ggcaggcgcggcggcggc

SEQ ID NO: 8988 - DNA, 19 bp, Homo sapiens
ggcagacaggtggcgggcg

SEQ ID NO: 8989 - DNA, 19 bp, Homo sapiens
aggcagcgggcggcgggcg

SEQ ID NO: 8990 - DNA, 18 bp, Homo sapiens
aggcagggggcggcggcc

SEQ ID NO: 8991 - DNA, 18 bp, Homo sapiens
aggcggacggccggcggc

SEQ ID NO: 8992 - DNA, 16 bp, Homo sapiens
ggcggagcaggcgacc

SEQ ID NO: 8993 - DNA, 17 bp, Homo sapiens
ggcagaggcgggcggcc

SEQ ID NO: 8994 - DNA, 18 bp, Homo sapiens
aggcaggagacggtgccc

SEQ ID NO: 8995 - DNA, 18 bp, Homo sapiens
aggcaggcaggcggcagg

SEQ ID NO: 8996 - DNA, 19 bp, Homo sapiens
ggcaggcagggggcggggc

SEQ ID NO: 8997 - DNA, 18 bp, Homo sapiens
aggcagggcaggcggtcc

SEQ ID NO: 8998 - DNA, 22 bp, Homo sapiens
aggcaggcaggcaggcaggccg

SEQ ID NO: 8999 - DNA, 18 bp, Homo sapiens
ggcaggtggaggcaggcg

SEQ ID NO: 9000 - DNA, 21 bp, Homo sapiens
agccaggcggcgcggcggccg

SEQ ID NO: 9001 - DNA, 19 bp, Homo sapiens
aggcagatgtgcgggcgcc

SEQ ID NO: 9002 - DNA, 17 bp, Homo sapiens
aggccaaggcaggcggc

SEQ ID NO: 9003 - DNA, 16 bp, Homo sapiens
ggcagacagaggaggc

SEQ ID NO: 9004 - DNA, 24 bp, Homo sapiens
aggtgagcccgatgtgggcggccg

SEQ ID NO: 9005 - DNA, 20 bp, Homo sapiens
ggcgggcgaggaggcggccg

SEQ ID NO: 9006 - DNA, 19 bp, Homo sapiens
aggcaggcaatgcaaggcc

SEQ ID NO: 9007 - DNA, 24 bp, Homo sapiens
aggtggagggaggaccggcggccg

SEQ ID NO: 9008 - DNA, 17 bp, Homo sapiens
aggcagacggaggcgac

SEQ ID NO: 9009 - DNA, 20 bp, Homo sapiens
gctggacagaggctcttctg

SEQ ID NO: 9010 - DNA, 19 bp, Homo sapiens
gttgcacattcctcttctg

SEQ ID NO: 9011 - DNA, 22 bp, Homo sapiens
gctgtggtctcttccagctctg

SEQ ID NO: 9012 - DNA, 21 bp, Homo sapiens
gctgtggctttctctctcctg

SEQ ID NO: 9013 - DNA, 18 bp, Homo sapiens
gctgcgcgccctctcccc

SEQ ID NO: 9014 - DNA, 15 bp, Homo sapiens
ctgccttcctcttct

SEQ ID NO: 9015 - DNA, 18 bp, Homo sapiens
ctggcctttcctcttctg

SEQ ID NO: 9016 - DNA, 19 bp, Homo sapiens
gctccaattctctcttccg

SEQ ID NO: 9017 - DNA, 16 bp, Homo sapiens
gctgcgatctcctcct

SEQ ID NO: 9018 - DNA, 22 bp, Homo sapiens
gctgtatccctctccatagctg

SEQ ID NO: 9019 - DNA, 22 bp, Homo sapiens
gcgcggcccgccgcctcttctg

SEQ ID NO: 9020 - DNA, 22 bp, Homo sapiens
gctgcagcctcctccccctctg

SEQ ID NO: 9021 - DNA, 18 bp, Homo sapiens
gcggcggcttccccttct

SEQ ID NO: 9022 - DNA, 16 bp, Homo sapiens
gctgcagctcctcctc

SEQ ID NO: 9023 - DNA, 23 bp, Homo sapiens
ctgcaaccctttcaccccttctg

SEQ ID NO: 9024 - DNA, 14 bp, Homo sapiens
actgtctcctcttc

SEQ ID NO: 9025 - DNA, 22 bp, Homo sapiens
actgtcaacctctccttttctg

SEQ ID NO: 9026 - DNA, 14 bp, Homo sapiens
tgcaatcctcttct

SEQ ID NO: 9027 - DNA, 18 bp, Homo sapiens
gcttcagccctctccacc

SEQ ID NO: 9028 - DNA, 20 bp, Homo sapiens
gctggaccctctcacacctg

SEQ ID NO: 9029 - DNA, 24 bp, Homo sapiens
gctgctggccctccccagcttctg

SEQ ID NO: 9030 - DNA, 21 bp, Homo sapiens
gctgcagcctcctccgttctg

SEQ ID NO: 9031 - DNA, 20 bp, Homo sapiens
gctgctctccccgccttctg

SEQ ID NO: 9032 - DNA, 18 bp, Homo sapiens
gctgcaactccttctcct

SEQ ID NO: 9033 - DNA, 21 bp, Homo sapiens
gctgcaacttctcctgctctg

SEQ ID NO: 9034 - DNA, 20 bp, Homo sapiens
gctgttgatcttcccttctg

SEQ ID NO: 9035 - DNA, 22 bp, Homo sapiens
gctggggtcctctccatcactg

SEQ ID NO: 9036 - DNA, 20 bp, Homo sapiens
ccggccctttttctcttctg

SEQ ID NO: 9037 - DNA, 19 bp, Homo sapiens
actgcaactttttcttctg

SEQ ID NO: 9038 - DNA, 16 bp, Homo sapiens
gctccaattcccttct

SEQ ID NO: 9039 - DNA, 19 bp, Homo sapiens
gctggtgtgtcctcttctg

SEQ ID NO: 9040 - DNA, 19 bp, Homo sapiens
gcttttgtctcctcttctg

SEQ ID NO: 9041 - DNA, 21 bp, Homo sapiens
gctgcaaccatctttaacctg

SEQ ID NO: 9042 - DNA, 20 bp, Homo sapiens
gctgcaactttccgtcactg

SEQ ID NO: 9043 - DNA, 79 bp, Monkeypox virus
tcgcgggccgctcgctatgccgactgacgttgacgttaatatataacgacgtcgtcgacgacgcgggttctgctcccga

SEQ ID NO: 9044 - DNA, 24 bp, Monkeypox virus
tatgccgactgacgttgacgttaa

SEQ ID NO: 9045 - DNA, 19 bp, Monkeypox virus
acgcgggttctgctcccga

SEQ ID NO: 9046 - DNA, 16 bp, Homo sapiens
tgccgactacgttccg

SEQ ID NO: 9047 - DNA, 86 bp, Monkeypox virus
cggctcctccgcctcgggcgacgggggctcggagatgaccggctgtgtctgacactcctccccttcctcaggcggcccgggcgccg

SEQ ID NO: 9048 - DNA, 24 bp, Monkeypox virus
tgtgtctgacactcctccccttcc

SEQ ID NO: 9049 - DNA, 24 bp, Monkeypox virus
cgggcgacgggggctcggagatga

SEQ ID NO: 9050 - DNA, 21 bp, Homo sapiens
gtgtctgatactgtaagcctt

SEQ ID NO: 9051 - DNA, 24 bp, Homo sapiens
tgtgtctgttgctctctactttcc

SEQ ID NO: 9052 - DNA, 22 bp, Homo sapiens
tgtgtctggcattccctgttcc

SEQ ID NO: 9053 - DNA, 18 bp, Homo sapiens
tgtgtctattatcccttc

SEQ ID NO: 9054 - DNA, 18 bp, Homo sapiens
tgtcctctcctccctttc

SEQ ID NO: 9055 - DNA, 19 bp, Homo sapiens
tgttctgactgcccccctt

SEQ ID NO: 9056 - DNA, 24 bp, Homo sapiens
tgtgtctgactcttctgaatgtcc

SEQ ID NO: 9057 - DNA, 18 bp, Homo sapiens
tgtgtctgaacttctgcc

SEQ ID NO: 9058 - DNA, 22 bp, Homo sapiens
tgtatctgccatcttcttttcc

SEQ ID NO: 9059 - DNA, 22 bp, Homo sapiens
tgtgtctgctgatttcttttcc

SEQ ID NO: 9060 - DNA, 22 bp, Homo sapiens
tgtgtctggttattaccctctt

SEQ ID NO: 9061 - DNA, 18 bp, Homo sapiens
tgtgtctggcttcctgcc

SEQ ID NO: 9062 - DNA, 19 bp, Homo sapiens
gtcctgttcttccccttcc

SEQ ID NO: 9063 - DNA, 18 bp, Homo sapiens
tgtgtctgtgctgcttcc

SEQ ID NO: 9064 - DNA, 27 bp, Homo sapiens
tgtgcctgacgtttcacagaccccctt

SEQ ID NO: 9065 - DNA, 22 bp, Homo sapiens
tgtgtctagtatagccccttcc

SEQ ID NO: 9066 - DNA, 20 bp, Homo sapiens
tgtccccatcctccccttcc

SEQ ID NO: 9067 - DNA, 19 bp, Homo sapiens
tgtgtctgttacttccctt

SEQ ID NO: 9068 - DNA, 20 bp, Homo sapiens
tgtgtctgtatgttcctgcc

SEQ ID NO: 9069 - DNA, 23 bp, Homo sapiens
tgtatttccatctctccccttcc

SEQ ID NO: 9070 - DNA, 128 bp, Monkeypox virus
gggggtggtcaacgccctagagagcgtgaccgtctacccggcctacgactgcgtgctctccgatctggaggccgccatgtgcctgctggccgcctacgggcacgcgctctgggacggccgcgaccccc

SEQ ID NO: 9071 - DNA, 24 bp, Monkeypox virus
acccggcctacgactgcgtgctct

SEQ ID NO: 9072 - DNA, 24 bp, Monkeypox virus
cgccatgtgcctgctggccgccta

SEQ ID NO: 9073 - DNA, 20 bp, Homo sapiens
acccggcctgagactgtcat

SEQ ID NO: 9074 - DNA, 21 bp, Homo sapiens
cccggcctgcgcttgccccct

SEQ ID NO: 9075 - DNA, 18 bp, Homo sapiens
cctggcctacattcactc

SEQ ID NO: 9076 - DNA, 20 bp, Homo sapiens
cggctggcactgcgtgttct

SEQ ID NO: 9077 - DNA, 16 bp, Homo sapiens
gccagtgcctgcagcc

SEQ ID NO: 9078 - DNA, 21 bp, Homo sapiens
gctgcctctgctggctgccta

SEQ ID NO: 9079 - DNA, 20 bp, Homo sapiens
cctatgtgcctgcacagcct

SEQ ID NO: 9080 - DNA, 19 bp, Homo sapiens
cgccagcctttggctgtct

SEQ ID NO: 9081 - DNA, 19 bp, Homo sapiens
cgccatgcgccggccgcct

SEQ ID NO: 9082 - DNA, 16 bp, Homo sapiens
tgtgtccctgtcaccc

SEQ ID NO: 9083 - DNA, 63 bp, Monkeypox virus
ggcctcgggggcaacgggggcggcgctctgctcatgcagctcagccgcgtcaaccccgtggcc

SEQ ID NO: 9084 - DNA, 22 bp, Monkeypox virus
cagccgcgtcaaccccgtggcc

SEQ ID NO: 9085 - DNA, 24 bp, Monkeypox virus
cgggggcaacgggggcggcgctct

SEQ ID NO: 9086 - DNA, 17 bp, Homo sapiens
cagccgctcaaccacgc

SEQ ID NO: 9087 - DNA, 20 bp, Homo sapiens
cagccgcgtgcagcccccgt

SEQ ID NO: 9088 - DNA, 19 bp, Homo sapiens
gcctcgcggtcccgtggcc

SEQ ID NO: 9089 - DNA, 18 bp, Homo sapiens
cagcagcgcccccgtggc

SEQ ID NO: 9090 - DNA, 18 bp, Homo sapiens
gcgtcagtcccccgtggc

SEQ ID NO: 9091 - DNA, 19 bp, Homo sapiens
cagccactctcccccgtgg

SEQ ID NO: 9092 - DNA, 17 bp, Homo sapiens
gccgcgtcgacgcggcc

SEQ ID NO: 9093 - DNA, 18 bp, Homo sapiens
gccgcccgctccgtggcc

SEQ ID NO: 9094 - DNA, 17 bp, Homo sapiens
gccccacagtccgtggc

SEQ ID NO: 9095 - DNA, 16 bp, Homo sapiens
cagccgcgcagtggac

SEQ ID NO: 9096 - DNA, 20 bp, Homo sapiens
caactcatcactccgtggcc

SEQ ID NO: 9097 - DNA, 21 bp, Homo sapiens
cagtgcgtgttgaccgcggcc

SEQ ID NO: 9098 - DNA, 19 bp, Homo sapiens
gccgtgcgcccctgtggcc

SEQ ID NO: 9099 - DNA, 16 bp, Homo sapiens
caggtgcgtcaacagc

SEQ ID NO: 9100 - DNA, 16 bp, Homo sapiens
cagcccaccctgtggc

SEQ ID NO: 9101 - DNA, 19 bp, Homo sapiens
cagccgcgccagccgcgcc

SEQ ID NO: 9102 - DNA, 17 bp, Homo sapiens
gctgcgccgccgtggcc

SEQ ID NO: 9103 - DNA, 18 bp, Homo sapiens
cagccgcgtcgcccccgt

SEQ ID NO: 9104 - DNA, 20 bp, Homo sapiens
agtccaggcaccccgtggcc

SEQ ID NO: 9105 - DNA, 18 bp, Homo sapiens
gccgctctccccgtggcc

SEQ ID NO: 9106 - DNA, 21 bp, Homo sapiens
gcccgctgtcgctccgtggcc

SEQ ID NO: 9107 - DNA, 19 bp, Homo sapiens
cagtcgcctcagttcccgc

SEQ ID NO: 9108 - DNA, 16 bp, Homo sapiens
agccgcctccccgtgg

SEQ ID NO: 9109 - DNA, 19 bp, Homo sapiens
ccgcgttctctccgtggcc

SEQ ID NO: 9110 - DNA, 20 bp, Homo sapiens
accgtcttctgtcccgtggc

SEQ ID NO: 9111 - DNA, 16 bp, Homo sapiens
cagcagcacccgtggc

SEQ ID NO: 9112 - DNA, 16 bp, Homo sapiens
gccggcttcccgtggc

SEQ ID NO: 9113 - DNA, 18 bp, Homo sapiens
gccgcgtctcgggtggcc

SEQ ID NO: 9114 - DNA, 17 bp, Homo sapiens
cgggggcgggggggcgg

SEQ ID NO: 9115 - DNA, 22 bp, Homo sapiens
cgggggcagcgtgggcagggct

SEQ ID NO: 9116 - DNA, 20 bp, Homo sapiens
gggggcagggggcgccttct

SEQ ID NO: 9117 - DNA, 19 bp, Homo sapiens
cgggggcagtggcggcact

SEQ ID NO: 9118 - DNA, 18 bp, Homo sapiens
caggggcggcaggcgctc

SEQ ID NO: 9119 - DNA, 19 bp, Homo sapiens
cggcggcggcgggggcggc

SEQ ID NO: 9120 - DNA, 19 bp, Homo sapiens
cgggggcggcggcggcggc

SEQ ID NO: 9121 - DNA, 18 bp, Homo sapiens
gggggcaggtgggggcgg

SEQ ID NO: 9122 - DNA, 24 bp, Homo sapiens
cggggccaagggcagggcggcgct

SEQ ID NO: 9123 - DNA, 21 bp, Homo sapiens
gggggcggcggcggtggcgct

SEQ ID NO: 9124 - DNA, 18 bp, Homo sapiens
ggggcagcgggaggcgct

SEQ ID NO: 9125 - DNA, 18 bp, Homo sapiens
caggggcgatgggggtgg

SEQ ID NO: 9126 - DNA, 18 bp, Homo sapiens
cgggggaacggagcgctc

SEQ ID NO: 9127 - DNA, 20 bp, Homo sapiens
cggggcggcgggggcgctct

SEQ ID NO: 9128 - DNA, 21 bp, Homo sapiens
ggggcagcagagtggtgctct

SEQ ID NO: 9129 - DNA, 23 bp, Homo sapiens
ggggcggtggcagcgcgcgctct

SEQ ID NO: 9130 - DNA, 23 bp, Homo sapiens
caggggcagtggcagcctgctct

SEQ ID NO: 9131 - DNA, 17 bp, Homo sapiens
gggggcacgggggcgcg

SEQ ID NO: 9132 - DNA, 19 bp, Homo sapiens
cgggggcggcggaggcgcg

SEQ ID NO: 9133 - DNA, 18 bp, Homo sapiens
gggggcagtgggggcggc

SEQ ID NO: 9134 - DNA, 20 bp, Homo sapiens
gggggtaacaggggtggaca

SEQ ID NO: 9135 - DNA, 18 bp, Homo sapiens
cgggggcacgggggtgcg

SEQ ID NO: 9136 - DNA, 17 bp, Homo sapiens
ggaggcagcgggggtgc

SEQ ID NO: 9137 - DNA, 22 bp, Homo sapiens
cgggggcggcggggccggggcc

SEQ ID NO: 9138 - DNA, 19 bp, Homo sapiens
caggggcggtggggagaac

SEQ ID NO: 9139 - DNA, 20 bp, Homo sapiens
gggcgtgcgagcggcgctct

SEQ ID NO: 9140 - DNA, 19 bp, Homo sapiens
cgggggcggcggcggcgct

SEQ ID NO: 9141 - DNA, 23 bp, Homo sapiens
cgggggcggcgggggctgccgct

SEQ ID NO: 9142 - DNA, 22 bp, Homo sapiens
cgggggcggcggcggctcgtct

SEQ ID NO: 9143 - DNA, 18 bp, Homo sapiens
ggggagcagactggtgct

SEQ ID NO: 9144 - DNA, 19 bp, Homo sapiens
cgggggcgcgcgggggcgg

SEQ ID NO: 9145 - DNA, 93 bp, Monkeypox virus
gcgcgtttgcgcacgttcacctcgcgagtgacgttgtggatgcgggagcgcgcgtccaccaagtcgagagcctcgtgttcgtcgcagttgcgc

SEQ ID NO: 9146 - DNA, 24 bp, Monkeypox virus
tcgcgagtgacgttgtggatgcgg

SEQ ID NO: 9147 - DNA, 24 bp, Monkeypox virus
tccaccaagtcgagagcctcgtgt

SEQ ID NO: 9148 - DNA, 20 bp, Homo sapiens
gagtgacagaaatggtgcgg

SEQ ID NO: 9149 - DNA, 104 bp, Ectromelia virus
ttaaaaatatggtttcagattgtctatttctggcttttaaaaataaaaacctttcgtttcctttactttcgaaccagtttatgcactttatttccattttttaa

SEQ ID NO: 9150 - DNA, 24 bp, Ectromelia virus
tttctggcttttaaaaataaaaac

SEQ ID NO: 9151 - DNA, 24 bp, Ectromelia virus
tcgaaccagtttatgcactttatt

SEQ ID NO: 9152 - DNA, 25 bp, Homo sapiens
tttctggctttgccaaaaataaaaa

SEQ ID NO: 9153 - DNA, 19 bp, Homo sapiens
ttcctgggataaaaataaa

SEQ ID NO: 9154 - DNA, 20 bp, Homo sapiens
tctggcttttgtctcaaaaa

SEQ ID NO: 9155 - DNA, 24 bp, Homo sapiens
ttctggccactagagaatgaaaac

SEQ ID NO: 9156 - DNA, 21 bp, Homo sapiens
tttctagctccaaatgaaaac

SEQ ID NO: 9157 - DNA, 21 bp, Homo sapiens
tggcttttaaattccataaaa

SEQ ID NO: 9158 - DNA, 19 bp, Homo sapiens
gaacacaggtcactttatt

SEQ ID NO: 9159 - DNA, 114 bp, Ectromelia virus
gtggcgagtcttttaaagtatacttcgtaaaatattcgttcagtagattttaatttaaaactcctatctataattctttcatacgtttttatatttactaattttttttgccat

SEQ ID NO: 9160 - DNA, 24 bp, Ectromelia virus
aagtatacttcgtaaaatattcgt

SEQ ID NO: 9161 - DNA, 24 bp, Ectromelia virus
taattctttcatacgtttttatat

SEQ ID NO: 9162 - DNA, 20 bp, Homo sapiens
taattcttccatcccacttt

SEQ ID NO: 9163 - DNA, 88 bp, Ectromelia virus
atgataaaatttcaacacatacttgtacagatgacatatttccacctgataacatttgcaaaagccttgttttgtatattcttatcat

SEQ ID NO: 9164 - DNA, 24 bp, Ectromelia virus
caaaagccttgttttgtatattct

SEQ ID NO: 9165 - DNA, 24 bp, Ectromelia virus
ttcaacacatacttgtacagatga

SEQ ID NO: 9166 - DNA, 17 bp, Homo sapiens
tgaaaccttgaatgtat

SEQ ID NO: 9167 - DNA, 17 bp, Homo sapiens
agtcttgttttgacatc

SEQ ID NO: 9168 - DNA, 19 bp, Homo sapiens
aagtcttgcttttgtatat

SEQ ID NO: 9169 - DNA, 23 bp, Homo sapiens
caaaagcttgggaattatattct

SEQ ID NO: 9170 - DNA, 18 bp, Homo sapiens
cttgtttttccctattct

SEQ ID NO: 9171 - DNA, 19 bp, Homo sapiens
cagaaacccatctttgtat

SEQ ID NO: 9172 - DNA, 23 bp, Homo sapiens
tgaaagccctgtttaaaacttct

SEQ ID NO: 9173 - DNA, 18 bp, Homo sapiens
aaaggccttgtcacattc

SEQ ID NO: 9174 - DNA, 20 bp, Homo sapiens
ttcaacacatgctttataga

SEQ ID NO: 9175 - DNA, 16 bp, Homo sapiens
aacacacacttaaatg

SEQ ID NO: 9176 - DNA, 20 bp, Homo sapiens
tccaacacctcgtatagatg

SEQ ID NO: 9177 - DNA, 23 bp, Homo sapiens
tcaatacatactacaacagatga

SEQ ID NO: 9178 - DNA, 23 bp, Homo sapiens
ttcaacacactgcttgtgcagcg

SEQ ID NO: 9179 - DNA, 19 bp, Homo sapiens
ttcaacacactggtggatg

SEQ ID NO: 9180 - DNA, 61 bp, Ectromelia virus
aaatggatttataggttttgtagctaataatacttttccattttctacctttgatccattt

SEQ ID NO: 9181 - DNA, 24 bp, Ectromelia virus
atggatttataggttttgtagcta

SEQ ID NO: 9182 - DNA, 24 bp, Ectromelia virus
cttttccattttctacctttgatc

SEQ ID NO: 9183 - DNA, 20 bp, Homo sapiens
gatttatataattgtggcta

SEQ ID NO: 9184 - DNA, 17 bp, Homo sapiens
atggatttagggctgtg

SEQ ID NO: 9185 - DNA, 21 bp, Homo sapiens
atggctttaccatcattgtag

SEQ ID NO: 9186 - DNA, 20 bp, Homo sapiens
tgaatgacagttttgtggct

SEQ ID NO: 9187 - DNA, 20 bp, Homo sapiens
tggatttaaaaggagtagct

SEQ ID NO: 9188 - DNA, 21 bp, Homo sapiens
tggatttattggtttatctct

SEQ ID NO: 9189 - DNA, 19 bp, Homo sapiens
atagattagaattttgtag

SEQ ID NO: 9190 - DNA, 15 bp, Homo sapiens
gatttataggttgct

SEQ ID NO: 9191 - DNA, 18 bp, Homo sapiens
ataggtttataggttttg

SEQ ID NO: 9192 - DNA, 17 bp, Homo sapiens
ctttttgttttctaccc

SEQ ID NO: 9193 - DNA, 19 bp, Homo sapiens
ttttccattatttgccttt

SEQ ID NO: 9194 - DNA, 20 bp, Homo sapiens
cttctccagaagagcctttg

SEQ ID NO: 9195 - DNA, 18 bp, Homo sapiens
ttttccattttcttcctt

SEQ ID NO: 9196 - DNA, 18 bp, Homo sapiens
ctttttcattttctgccc

SEQ ID NO: 9197 - DNA, 18 bp, Homo sapiens
cttttccattttttcctc

SEQ ID NO: 9198 - DNA, 25 bp, Homo sapiens
cttttccatatttctgtttttaatc

SEQ ID NO: 9199 - DNA, 130 bp, Ectromelia virus
attttctcatctaataataagtttaatagaggtccttttattaatgtactagctctgtattcaaacaccatggattgtggcaatatataagtaaaagctccagcatctatttttgtttcaattccgtagt

SEQ ID NO: 9200 - DNA, 24 bp, Ectromelia virus
tggcaatatataagtaaaagctcc

SEQ ID NO: 9201 - DNA, 24 bp, Ectromelia virus
taatgtactagctctgtattcaaa

SEQ ID NO: 9202 - DNA, 17 bp, Homo sapiens
tggcaatatcaaaggct

SEQ ID NO: 9203 - DNA, 20 bp, Homo sapiens
tggcagactgtgtaaaagct

SEQ ID NO: 9204 - DNA, 19 bp, Homo sapiens
tggcaatatttcgttaagt

SEQ ID NO: 9205 - DNA, 20 bp, Homo sapiens
gctgatacctcgtaaaagct

SEQ ID NO: 9206 - DNA, 18 bp, Homo sapiens
gctacaaggtaaaagctc

SEQ ID NO: 9207 - DNA, 19 bp, Homo sapiens
tggcaacagagtgagagct

SEQ ID NO: 9208 - DNA, 20 bp, Homo sapiens
tggaaatatacacaaggctc

SEQ ID NO: 9209 - DNA, 15 bp, Homo sapiens
tggcaaataaaagct

SEQ ID NO: 9210 - DNA, 23 bp, Homo sapiens
tggcaacatgcactggaagctcc

SEQ ID NO: 9211 - DNA, 22 bp, Homo sapiens
taatgtacagctctcacacaaa

SEQ ID NO: 9212 - DNA, 21 bp, Homo sapiens
taatgtactgcataaaatatt

SEQ ID NO: 9213 - DNA, 67 bp, Cowpox virus
gtagcgagtcttttaaagtatacttcgtaaaatattctttcagtagattttaatttaaaactcctat

SEQ ID NO: 9214 - DNA, 24 bp, Cowpox virus
tagattttaatttaaaactcctat

SEQ ID NO: 9215 - DNA, 24 bp, Cowpox virus
agcgagtcttttaaagtatacttc

SEQ ID NO: 9216 - DNA, 18 bp, Homo sapiens
agcagtcttttggagtat

SEQ ID NO: 9217 - DNA, 22 bp, Homo sapiens
agtgagtctcttaaagacgctt

SEQ ID NO: 9218 - DNA, 127 bp, Cowpox virus
agacgtattagcggatctaatggaatccaattgattgactatcttttgaaaatatacatttttatgatccgatacttgtaagaatatagcaacaatgataattccatcatcgtgtttttttgcctct

SEQ ID NO: 9219 - DNA, 24 bp, Cowpox virus
taagaatatagcaacaatgataat

SEQ ID NO: 9220 - DNA, 24 bp, Cowpox virus
taatggaatccaattgattgacta

SEQ ID NO: 9221 - DNA, 16 bp, Homo sapiens
gaacatagcatatgat

SEQ ID NO: 9222 - DNA, 21 bp, Homo sapiens
taagaatatataaaaaatgat

SEQ ID NO: 9223 - DNA, 20 bp, Homo sapiens
agcagcaccacaacaatgat

SEQ ID NO: 9224 - DNA, 20 bp, Homo sapiens
caagaataaacaataatgat

SEQ ID NO: 9225 - DNA, 17 bp, Homo sapiens
aaaatatagcaaataat

SEQ ID NO: 9226 - DNA, 98 bp, Cowpox virus
gaaatataccgtaaatcaaagttgtttccattaaaagttaccacataatcgaatgtcaattccaaaagcttttttgcgacttttagcatggtaatttc

SEQ ID NO: 9227 - DNA, 24 bp, Cowpox virus
caaaagcttttttgcgacttttag

SEQ ID NO: 9228 - DNA, 24 bp, Cowpox virus
aaagttaccacataatcgaatgtc

SEQ ID NO: 9229 - DNA, 21 bp, Homo sapiens
caaaagcttttttttttttag

SEQ ID NO: 9230 - DNA, 19 bp, Homo sapiens
caaaagcttttttgtttac

SEQ ID NO: 9231 - DNA, 19 bp, Homo sapiens
cagaagctttttggcttct

SEQ ID NO: 9232 - DNA, 25 bp, Homo sapiens
aaagttaccactatagtatacagtc

SEQ ID NO: 9233 - DNA, 21 bp, Homo sapiens
aaagttaccattagaattgtc

SEQ ID NO: 9234 - DNA, 23 bp, Homo sapiens
aaagttttacatttacaaatgtc

SEQ ID NO: 9235 - DNA, 85 bp, Cowpox virus
ccgcccgcgcggcatctcattagcgcccggcgcgggcggcttccgcttccgcccgcgatgctaatgagaccctcgtcgcgggcgg

SEQ ID NO: 9236 - DNA, 24 bp, Cowpox virus
catctcattagcgcccggcgcggg

SEQ ID NO: 9237 - DNA, 24 bp, Cowpox virus
cccgcgatgctaatgagaccctcg

SEQ ID NO: 9238 - DNA, 21 bp, Homo sapiens
tcccggctggcctggcgcggg

SEQ ID NO: 9239 - DNA, 66 bp, Cowpox virus
gtttctatattaataggagatagttgttgagtcatagtaaaaatgaaatgataactgtttagaaat

SEQ ID NO: 9240 - DNA, 24 bp, Cowpox virus
tctatattaataggagatagttgt

SEQ ID NO: 9241 - DNA, 21 bp, Cowpox virus
aaatgataactgtttagaaat

SEQ ID NO: 9242 - DNA, 23 bp, Homo sapiens
tctatattaatggaatctattgt

SEQ ID NO: 9243 - DNA, 97 bp, Cowpox virus
ttcttgtttgtttatttctgcttctaatctattatttgcaacaaatacagatactaatgtttcaggggataagtttccgaataaacatacattaggg

SEQ ID NO: 9244 - DNA, 24 bp, Cowpox virus
aatacagatactaatgtttcaggg

SEQ ID NO: 9245 - DNA, 24 bp, Cowpox virus
tgcttctaatctattatttgcaac

SEQ ID NO: 9246 - DNA, 20 bp, Homo sapiens
aatacagagctagtgtttgg

SEQ ID NO: 9247 - DNA, 17 bp, Homo sapiens
caggtccagtttcaggg

SEQ ID NO: 9248 - DNA, 21 bp, Homo sapiens
aatacagatctaaagtctggg

SEQ ID NO: 9249 - DNA, 18 bp, Homo sapiens
gatgggtatgtttcaggg

SEQ ID NO: 9250 - DNA, 24 bp, Homo sapiens
gaacagatgtgcctgatttcaggg

SEQ ID NO: 9251 - DNA, 19 bp, Homo sapiens
gatactaaatgtggcaggg

SEQ ID NO: 9252 - DNA, 20 bp, Homo sapiens
tgcttctaattatcatcaac

SEQ ID NO: 9253 - DNA, 25 bp, Homo sapiens
tgtttctaatcctgtttttctgcaa

SEQ ID NO: 9254 - DNA, 22 bp, Homo sapiens
gctgggttttctgttatttgca

SEQ ID NO: 9255 - DNA, 17 bp, Homo sapiens
cttctgggtcatttgca

SEQ ID NO: 9256 - DNA, 18 bp, Homo sapiens
tgcttctaatactaagca

SEQ ID NO: 9257 - DNA, 26 bp, Homo sapiens
tgcttctaatttttttcattttgcaa

SEQ ID NO: 9258 - DNA, 18 bp, Homo sapiens
ttctgatccctttgcaac

SEQ ID NO: 9259 - DNA, 67 bp, Camelpox virus
gtgcgctttgtactcagcttgtcttcgaaacgattctccgatgttgttggttgactgcgcagctcac

SEQ ID NO: 9260 - DNA, 21 bp, Camelpox virus
ttggttgactgcgcagctcac

SEQ ID NO: 9261 - DNA, 24 bp, Camelpox virus
gcgctttgtactcagcttgtcttc

SEQ ID NO: 9262 - DNA, 19 bp, Homo sapiens
ggttgactcccccagctca

SEQ ID NO: 9263 - DNA, 19 bp, Homo sapiens
ttggttgattcaagctcac

SEQ ID NO: 9264 - DNA, 16 bp, Homo sapiens
ttggttgatgagctca

SEQ ID NO: 9265 - DNA, 18 bp, Homo sapiens
ttgcttgctcacgcagct

SEQ ID NO: 9266 - DNA, 19 bp, Homo sapiens
ttggttgactgcagcctcc

SEQ ID NO: 9267 - DNA, 19 bp, Homo sapiens
tggtgatcagtgcagctca

SEQ ID NO: 9268 - DNA, 16 bp, Homo sapiens
ttagttgactcaagct

SEQ ID NO: 9269 - DNA, 19 bp, Homo sapiens
ggcggggctgcgcagctca

SEQ ID NO: 9270 - DNA, 91 bp, Camelpox virus
cttgtaaacttcatcgtttattgttatataatttcctgtagataaaactttagaaaatagcaatgattttccctttacgtccgttaacgag

SEQ ID NO: 9271 - DNA, 24 bp, Camelpox virus
ttagaaaatagcaatgattttccc

SEQ ID NO: 9272 - DNA, 24 bp, Camelpox virus
gtttattgttatataatttcctgt

SEQ ID NO: 9273 - DNA, 21 bp, Homo sapiens
ttagaaaagagcacaattttc

SEQ ID NO: 9274 - DNA, 21 bp, Homo sapiens
aaagatatgactgattttccc

SEQ ID NO: 9275 - DNA, 21 bp, Homo sapiens
ttaaaaaatgcttattttccc

SEQ ID NO: 9276 - DNA, 22 bp, Homo sapiens
tagaaaatagcttctgttttcc

SEQ ID NO: 9277 - DNA, 21 bp, Homo sapiens
ttagaaagaagcgtgattctc

SEQ ID NO: 9278 - DNA, 21 bp, Homo sapiens
agaaaatatctgaattttccc

SEQ ID NO: 9279 - DNA, 20 bp, Homo sapiens
agaaaatagaatggattttc

SEQ ID NO: 9280 - DNA, 17 bp, Homo sapiens
ttagagaatgcaatgat

SEQ ID NO: 9281 - DNA, 19 bp, Homo sapiens
tagaggcagctgattttcc

SEQ ID NO: 9282 - DNA, 22 bp, Homo sapiens
gaaaataccacttgattttccc

SEQ ID NO: 9283 - DNA, 21 bp, Homo sapiens
ttaggaaatagcaacagtttt

SEQ ID NO: 9284 - DNA, 15 bp, Homo sapiens
gaaaatagctttttc

SEQ ID NO: 9285 - DNA, 16 bp, Homo sapiens
gaaaatagccttttcc

SEQ ID NO: 9286 - DNA, 16 bp, Homo sapiens
ttagaaaatacaattc

SEQ ID NO: 9287 - DNA, 23 bp, Homo sapiens
ttagaaaatggcagcgctattcc

SEQ ID NO: 9288 - DNA, 21 bp, Homo sapiens
tagaaaatagcaaatgatttt

SEQ ID NO: 9289 - DNA, 21 bp, Homo sapiens
agaaaatagtacatgctttcc

SEQ ID NO: 9290 - DNA, 20 bp, Homo sapiens
aaaaatagcagatcggttcc

SEQ ID NO: 9291 - DNA, 22 bp, Homo sapiens
ttagaaaatagaatatgaattc

SEQ ID NO: 9292 - DNA, 21 bp, Homo sapiens
gaaaacagtagcacccctccc

SEQ ID NO: 9293 - DNA, 18 bp, Homo sapiens
taggaaatagcactttcc

SEQ ID NO: 9294 - DNA, 62 bp, Camelpox virus
acgttaaagctaaattgcttatggtgggtgggtcttcttacttgcccggtctgctgtcacgt

SEQ ID NO: 9295 - DNA, 24 bp, Camelpox virus
ttaaagctaaattgcttatggtgg

SEQ ID NO: 9296 - DNA, 22 bp, Camelpox virus
cttgcccggtctgctgtcacgt

SEQ ID NO: 9297 - DNA, 20 bp, Homo sapiens
gctaagtgttgatatggtgg

SEQ ID NO: 9298 - DNA, 19 bp, Homo sapiens
ttaaagctgaattctttgg

SEQ ID NO: 9299 - DNA, 72 bp, Camelpox virus
tatctttgttaattagcgtaaattttaactcttttccaaataagtttatgtaacaacaactaacatgagata

SEQ ID NO: 9300 - DNA, 24 bp, Camelpox virus
tctttgttaattagcgtaaatttt

SEQ ID NO: 9301 - DNA, 24 bp, Camelpox virus
tgtaacaacaactaacatgagata

SEQ ID NO: 9302 - DNA, 18 bp, Homo sapiens
tctttattaattgtgcat

SEQ ID NO: 9303 - DNA, 94 bp, Camelpox virus
gcaccggtgttatctgttcagtccctgccaactacaattgtttgcaaaggtcttttaccgaaagttgtgtcaatctgagtggctacccctgtgt

SEQ ID NO: 9304 - DNA, 24 bp, Camelpox virus
tatctgttcagtccctgccaacta

SEQ ID NO: 9305 - DNA, 24 bp, Camelpox virus
tgtgtcaatctgagtggctacccc

SEQ ID NO: 9306 - DNA, 18 bp, Homo sapiens
tatctgttcatgtttctg

SEQ ID NO: 9307 - DNA, 18 bp, Homo sapiens
tgttcagtgctacagact

SEQ ID NO: 9308 - DNA, 21 bp, Homo sapiens
tatgtgtttaactgccaacta

SEQ ID NO: 9309 - DNA, 19 bp, Homo sapiens
tatctgttcaagtccctgc

SEQ ID NO: 9310 - DNA, 18 bp, Homo sapiens
catctgtctctgccagct

SEQ ID NO: 9311 - DNA, 19 bp, Homo sapiens
tatctgttcatagttaact

SEQ ID NO: 9312 - DNA, 18 bp, Homo sapiens
tgttcagcgacttaacta

SEQ ID NO: 9313 - DNA, 22 bp, Homo sapiens
tatctgtctagtaatctgacta

SEQ ID NO: 9314 - DNA, 23 bp, Homo sapiens
tatctgttagtcctggaaagcta

SEQ ID NO: 9315 - DNA, 22 bp, Homo sapiens
tatcttttcagtccaaaaacta

SEQ ID NO: 9316 - DNA, 22 bp, Homo sapiens
tatctgcttcagtttataacta

SEQ ID NO: 9317 - DNA, 17 bp, Homo sapiens
ctgttcagcagctaact

SEQ ID NO: 9318 - DNA, 75 bp, Variola virus
cgttgtggattgtctgacctttgaaaaaatttttgtgtccgtgtagcatttcaataaaagtcattatctgctccg

SEQ ID NO: 9319 - DNA, 24 bp, Variola virus
ttgaaaaaatttttgtgtccgtgt

SEQ ID NO: 9320 - DNA, 24 bp, Variola virus
atttcaataaaagtcattatctgc

SEQ ID NO: 9321 - DNA, 22 bp, Homo sapiens
ttaaaaaagtttccccccgtgt

SEQ ID NO: 9322 - DNA, 23 bp, Homo sapiens
ttaaaaaaagagcatgtctgtgt

SEQ ID NO: 9323 - DNA, 129 bp, Variola virus
cactatgtcgtggattagtttagatgacacttgttgtaggagattgtataagttcggggccgtatgggtggttctcatgaacggaacgattcctacagtacagatccagtctacatatctgttatagtg

SEQ ID NO: 9324 - DNA, 24 bp, Variola virus
ttctcatgaacggaacgattccta

SEQ ID NO: 9325 - DNA, 24 bp, Variola virus
acttgttgtaggagattgtataag

SEQ ID NO: 9326 - DNA, 17 bp, Homo sapiens
tcttgagggcaattcct

SEQ ID NO: 9327 - DNA, 21 bp, Homo sapiens
acttgtgtagatttgtataag

SEQ ID NO: 9328 - DNA, 19 bp, Homo sapiens
acttgatgtaggaatataa

SEQ ID NO: 9329 - DNA, 19 bp, Homo sapiens
acttgttttgggaatatat

SEQ ID NO: 9330 - DNA, 18 bp, Homo sapiens
acttgttataggtttata

SEQ ID NO: 9331 - DNA, 72 bp, Variola virus
ccacgtcgttggtttcttttatcatcttcttgtacttgaggcgttccgttagaaacgttttcaacaacttgg

SEQ ID NO: 9332 - DNA, 24 bp, Variola virus
cgttccgttagaaacgttttcaac

SEQ ID NO: 9333 - DNA, 24 bp, Variola virus
tcgttggtttcttttatcatcttc

SEQ ID NO: 9334 - DNA, 19 bp, Homo sapiens
cgttctgttaaaaacctcc

SEQ ID NO: 9335 - DNA, 18 bp, Homo sapiens
atttcgttaagttttcaa

SEQ ID NO: 9336 - DNA, 23 bp, Homo sapiens
gttccgttcagaggcccctccca

SEQ ID NO: 9337 - DNA, 20 bp, Homo sapiens
gttccttagggaacacttca

SEQ ID NO: 9338 - DNA, 21 bp, Homo sapiens
gttttgttagaaagcattcaa

SEQ ID NO: 9339 - DNA, 18 bp, Homo sapiens
gccccaaaacgttttcaa

SEQ ID NO: 9340 - DNA, 68 bp, Variola virus
cgaagaatgtcgtgccgttgttgttgtttacgtgatacgtggtgttcgataccccgccgactcctttg

SEQ ID NO: 9341 - DNA, 19 bp, Variola virus
taccccgccgactcctttg

SEQ ID NO: 9342 - DNA, 24 bp, Variola virus
tgtcgtgccgttgttgttgtttac

SEQ ID NO: 9343 - DNA, 21 bp, Homo sapiens
ccccgccctcgctttcctttg

SEQ ID NO: 9344 - DNA, 18 bp, Homo sapiens
accccgccgtgtcatttg

SEQ ID NO: 9345 - DNA, 16 bp, Homo sapiens
tacccctccccatttg

SEQ ID NO: 9346 - DNA, 19 bp, Homo sapiens
cccctgcccccaccctttg

SEQ ID NO: 9347 - DNA, 19 bp, Homo sapiens
ccccgcttcattccctttg

SEQ ID NO: 9348 - DNA, 18 bp, Homo sapiens
cccctctccgctcctttg

SEQ ID NO: 9349 - DNA, 19 bp, Homo sapiens
taccttggcttcccctttg

SEQ ID NO: 9350 - DNA, 69 bp, Alcelaphine herpesvirus 1
gggctctctgccgtgcgaggctcctcacagacacacagcaagaaagaagcgccgcgcagcagatagccc

SEQ ID NO: 9351 - DNA, 18 bp, Alcelaphine herpesvirus 1
ccgcgcagcagatagccc

SEQ ID NO: 9352 - DNA, 24 bp, Alcelaphine herpesvirus 1
tctctgccgtgcgaggctcctcac

SEQ ID NO: 9353 - DNA, 18 bp, Homo sapiens
cgcagcagacactggccc

SEQ ID NO: 9354 - DNA, 16 bp, Homo sapiens
cccgcagcagctgccc

SEQ ID NO: 9355 - DNA, 21 bp, Homo sapiens
ccgcgcagcagcgaacggccc

SEQ ID NO: 9356 - DNA, 20 bp, Homo sapiens
ccgcgcaggtggaaagaccc

SEQ ID NO: 9357 - DNA, 19 bp, Homo sapiens
ccgcgcagtcggagcaccc

SEQ ID NO: 9358 - DNA, 16 bp, Homo sapiens
ccgcgcaacaccaccc

SEQ ID NO: 9359 - DNA, 18 bp, Homo sapiens
ccacgcagctggagggcc

SEQ ID NO: 9360 - DNA, 18 bp, Homo sapiens
ccgcgcaggatccctgcc

SEQ ID NO: 9361 - DNA, 19 bp, Homo sapiens
ccgcagcagccctcagccc

SEQ ID NO: 9362 - DNA, 18 bp, Homo sapiens
cgcgcgtaaaaatagccc

SEQ ID NO: 9363 - DNA, 18 bp, Homo sapiens
ccgcacagcagcgcaccc

SEQ ID NO: 9364 - DNA, 15 bp, Homo sapiens
ccgcgaggacagccc

SEQ ID NO: 9365 - DNA, 16 bp, Homo sapiens
cccgcagaaacagccc

SEQ ID NO: 9366 - DNA, 20 bp, Homo sapiens
ccgcgcagctcggccagccc

SEQ ID NO: 9367 - DNA, 19 bp, Homo sapiens
cgcgcagcccgcgcagccc

SEQ ID NO: 9368 - DNA, 15 bp, Homo sapiens
ccgccatgacagccc

SEQ ID NO: 9369 - DNA, 19 bp, Homo sapiens
ccgcgcaggcgcagggccc

SEQ ID NO: 9370 - DNA, 16 bp, Homo sapiens
cctgcagagacagccc

SEQ ID NO: 9371 - DNA, 18 bp, Homo sapiens
ccaccagacagatagtcc

SEQ ID NO: 9372 - DNA, 20 bp, Homo sapiens
ccgcgcagtccgaggagtcc

SEQ ID NO: 9373 - DNA, 15 bp, Homo sapiens
ccgcccagcagaccc

SEQ ID NO: 9374 - DNA, 17 bp, Homo sapiens
ccgcgcagcactggccc

SEQ ID NO: 9375 - DNA, 15 bp, Homo sapiens
ccgggcagcaaaccc

SEQ ID NO: 9376 - DNA, 73 bp, Alcelaphine herpesvirus 1
gtgcagagaccgcctgggtgtgactgtttttaggcctaacaaaggcacagaaacacccgtgcggtctctgtat

SEQ ID NO: 9377 - DNA, 23 bp, Alcelaphine herpesvirus 1
aaacacccgtgcggtctctgtat

SEQ ID NO: 9378 - DNA, 24 bp, Alcelaphine herpesvirus 1
tgactgtttttaggcctaacaaag

SEQ ID NO: 9379 - DNA, 17 bp, Homo sapiens
aaagacccttctctgta

SEQ ID NO: 9380 - DNA, 18 bp, Homo sapiens
acccagagaggtctctgt

SEQ ID NO: 9381 - DNA, 19 bp, Homo sapiens
ccctacaaaatctctgtat

SEQ ID NO: 9382 - DNA, 17 bp, Homo sapiens
aacaccagtgcctctgt

SEQ ID NO: 9383 - DNA, 18 bp, Homo sapiens
acacactcactctctgta

SEQ ID NO: 9384 - DNA, 20 bp, Homo sapiens
acaccagatcatctctgtat

SEQ ID NO: 9385 - DNA, 21 bp, Homo sapiens
aaacatctctgtggtcccagt

SEQ ID NO: 9386 - DNA, 16 bp, Homo sapiens
acaccctgtccctgta

SEQ ID NO: 9387 - DNA, 24 bp, Homo sapiens
gaacccctgggcacatttctgtat

SEQ ID NO: 9388 - DNA, 20 bp, Homo sapiens
ccactgctgttggtttctgt

SEQ ID NO: 9389 - DNA, 21 bp, Homo sapiens
aaacgcttaagccgtctctgt

SEQ ID NO: 9390 - DNA, 81 bp, Alcelaphine herpesvirus 1
gagacaagctttcaatatctgaatctaaagtaaagtcatgtttagaagtttcggataaatttattaatgaatgcatgtctt

SEQ ID NO: 9391 - DNA, 24 bp, Alcelaphine herpesvirus 1
ttcaatatctgaatctaaagtaaa

SEQ ID NO: 9392 - DNA, 24 bp, Alcelaphine herpesvirus 1
ttcggataaatttattaatgaatg

SEQ ID NO: 9393 - DNA, 20 bp, Homo sapiens
ttcaaatccaattctaaagt

SEQ ID NO: 9394 - DNA, 20 bp, Homo sapiens
ttcagataaatttattactg

SEQ ID NO: 9395 - DNA, 19 bp, Homo sapiens
agaagtttattaatgaatg

SEQ ID NO: 9396 - DNA, 101 bp, Alcelaphine herpesvirus 1
tattttcaaatagccgatttgcagttttcagtgtttcgatttcgtccagttgtgattgaatctgttcctccatgcattttatgatttgttttttgaagata

SEQ ID NO: 9397 - DNA, 24 bp, Alcelaphine herpesvirus 1
ttgaatctgttcctccatgcattt

SEQ ID NO: 9398 - DNA, 24 bp, Alcelaphine herpesvirus 1
tagccgatttgcagttttcagtgt

SEQ ID NO: 9399 - DNA, 15 bp, Homo sapiens
ttgaatctgttttgc

SEQ ID NO: 9400 - DNA, 19 bp, Homo sapiens
ttcaatctgctcatgcatt

SEQ ID NO: 9401 - DNA, 19 bp, Homo sapiens
ttgaatctttcttcccatt

SEQ ID NO: 9402 - DNA, 19 bp, Homo sapiens
cgatttgcagtgacaatgt

SEQ ID NO: 9403 - DNA, 22 bp, Homo sapiens
tagccatggcgcttttcagtgt

SEQ ID NO: 9404 - DNA, 66 bp, Alcelaphine herpesvirus 1
gtattcagcaattgacacattttacggtgcctgtgtaggttttcgtgtttattcaattctgagtat

SEQ ID NO: 9405 - DNA, 24 bp, Alcelaphine herpesvirus 1
ttcgtgtttattcaattctgagta

SEQ ID NO: 9406 - DNA, 24 bp, Alcelaphine herpesvirus 1
tcagcaattgacacattttacggt

SEQ ID NO: 9407 - DNA, 21 bp, Homo sapiens
ttcgtttttattgtcctgagt

SEQ ID NO: 9408 - DNA, 19 bp, Homo sapiens
tgtctaagtaattctgagt

SEQ ID NO: 9409 - DNA, 19 bp, Homo sapiens
tgtctgtttaattctgagt

SEQ ID NO: 9410 - DNA, 23 bp, Homo sapiens
ttcatgtttattttaggagagta

SEQ ID NO: 9411 - DNA, 24 bp, Homo sapiens
tcagtaattcacactccgcatggt

SEQ ID NO: 9412 - DNA, 97 bp, Murid herpesvirus 4
gaacgtctctctctcctgtgtcgatcgcagagcgttttcggaactgtcctcggttcagcataagtttattttggtctattatagagggggtgatttc

SEQ ID NO: 9413 - DNA, 24 bp, Murid herpesvirus 4
ttcagcataagtttattttggtct

SEQ ID NO: 9414 - DNA, 24 bp, Murid herpesvirus 4
tctctctcctgtgtcgatcgcaga

SEQ ID NO: 9415 - DNA, 17 bp, Homo sapiens
cagcataagtttggccc

SEQ ID NO: 9416 - DNA, 22 bp, Homo sapiens
ttcagcataggttattcctggt

SEQ ID NO: 9417 - DNA, 21 bp, Homo sapiens
ttcagtaagtatcattttggt

SEQ ID NO: 9418 - DNA, 20 bp, Homo sapiens
ttcagcacaggtttatgcct

SEQ ID NO: 9419 - DNA, 23 bp, Homo sapiens
tctcctcctgtgtgcatggcaga

SEQ ID NO: 9420 - DNA, 16 bp, Homo sapiens
tctctctctgtgagca

SEQ ID NO: 9421 - DNA, 19 bp, Homo sapiens
tctctcctctcatgtgcag

SEQ ID NO: 9422 - DNA, 24 bp, Homo sapiens
tctctctcttatgcaccaagcaga

SEQ ID NO: 9423 - DNA, 18 bp, Homo sapiens
ctctcctgtgccgtgcag

SEQ ID NO: 9424 - DNA, 19 bp, Homo sapiens
tccttttcctgtgcgctcg

SEQ ID NO: 9425 - DNA, 20 bp, Homo sapiens
tctcctcctgttcgccgcag

SEQ ID NO: 9426 - DNA, 20 bp, Homo sapiens
tcgctctcctgtgtttctcg

SEQ ID NO: 9427 - DNA, 95 bp, Murid herpesvirus 4
gaaaggcatgtgggttaatgattaaatcaggtactatgccatctttagtgaaaggcatgttttcttgggcataaatcataccacaggtacctttt

SEQ ID NO: 9428 - DNA, 17 bp, Murid herpesvirus 4
taccacaggtacctttt

SEQ ID NO: 9429 - DNA, 24 bp, Murid herpesvirus 4
ttaatgattaaatcaggtactatg

SEQ ID NO: 9430 - DNA, 19 bp, Homo sapiens
taccacagtgacacctttt

SEQ ID NO: 9431 - DNA, 18 bp, Homo sapiens
accacagggggacctttt

SEQ ID NO: 9432 - DNA, 128 bp, Murid herpesvirus 4
agtttagatgacacttgttgtagaagattgtataagttcggggccgtaggggtggttctcatgaacggaacgattcctacggtacagatccagtctacatatctgttatagtgactgttgtctatgct

SEQ ID NO: 9433 - DNA, 24 bp, Murid herpesvirus 4
tagaagattgtataagttcggggc

SEQ ID NO: 9434 - DNA, 24 bp, Murid herpesvirus 4
tacagatccagtctacatatctgt

SEQ ID NO: 9435 - DNA, 18 bp, Homo sapiens
gaagattgtgaggtgggg

SEQ ID NO: 9436 - DNA, 16 bp, Homo sapiens
tagaagattgtgtgcg

SEQ ID NO: 9437 - DNA, 22 bp, Homo sapiens
catgtccagacagcatatctgt

SEQ ID NO: 9438 - DNA, 18 bp, Homo sapiens
tccaggcagcatatctgt

SEQ ID NO: 9439 - DNA, 18 bp, Homo sapiens
cacaggtccagtctgcac

SEQ ID NO: 9440 - DNA, 14 bp, Homo sapiens
gatccagtctcctg

SEQ ID NO: 9441 - DNA, 19 bp, Homo sapiens
gatttgccacaatatctgt

SEQ ID NO: 9442 - DNA, 72 bp, Murid herpesvirus 4
aggacaatttttgagttctatttcaatgtcatcacattttcgacaatattcaaaatcatcgcttattgtttt

SEQ ID NO: 9443 - DNA, 24 bp, Murid herpesvirus 4
caatttttgagttctatttcaatg

SEQ ID NO: 9444 - DNA, 24 bp, Murid herpesvirus 4
cgacaatattcaaaatcatcgctt

SEQ ID NO: 9445 - DNA, 23 bp, Homo sapiens
caattttcagtgctattttaatg

SEQ ID NO: 9446 - DNA, 23 bp, Homo sapiens
caattcttgaagcagtttcaatg

SEQ ID NO: 9447 - DNA, 78 bp, Murid herpesvirus 4
ggttgtattaaaggcttaatttcagctttatcaatacctagtgtaaatctaacagataatgctgtatttaatacaact

SEQ ID NO: 9448 - DNA, 22 bp, Murid herpesvirus 4
taatgctgtatttaatacaact

SEQ ID NO: 9449 - DNA, 24 bp, Murid herpesvirus 4
ttaaaggcttaatttcagctttat

SEQ ID NO: 9450 - DNA, 14 bp, Homo sapiens
aatgctgtattaca

SEQ ID NO: 9451 - DNA, 16 bp, Homo sapiens
tgctgtattagcaact

SEQ ID NO: 9452 - DNA, 17 bp, Homo sapiens
caatgcattttaataca

SEQ ID NO: 9453 - DNA, 19 bp, Homo sapiens
taatgctgtgtattcaata

SEQ ID NO: 9454 - DNA, 18 bp, Homo sapiens
caatgctatttaatacaa

SEQ ID NO: 9455 - DNA, 17 bp, Homo sapiens
aatgctgtatttgacaa

SEQ ID NO: 9456 - DNA, 130 bp, Sulfolobus virus SIRV-1
tgcttatactctaagagtatcgccaccgacgacgacgacggcagtcgctgcccggcgaagccgagccgccgcgaagcggcgagcgactgccgtcgtcgtcgtcggtggcgatactcttagagtataagca

SEQ ID NO: 9457 - DNA, 24 bp, Sulfolobus virus SIRV-1
taagagtatcgccaccgacgacga

SEQ ID NO: 9458 - DNA, 24 bp, Sulfolobus virus SIRV-1
actgccgtcgtcgtcgtcggtggc

SEQ ID NO: 9459 - DNA, 21 bp, Homo sapiens
tgaagctaacaccaccgatga

SEQ ID NO: 9460 - DNA, 18 bp, Homo sapiens
taagagtattgccacaga

SEQ ID NO: 9461 - DNA, 26 bp, Homo sapiens
gagtatcgtcactatggtcgtcgtcg

SEQ ID NO: 9462 - DNA, 22 bp, Homo sapiens
agagtatcagctacttccgccg

SEQ ID NO: 9463 - DNA, 22 bp, Homo sapiens
ctgccgtccagatgttggtggc

SEQ ID NO: 9464 - DNA, 70 bp, Sulfolobus virus SIRV-1
attcatagtttttaaaatttttacatttgagaaatcatattcaaatggaaaatttgttttatctaagaat

SEQ ID NO: 9465 - DNA, 24 bp, Sulfolobus virus SIRV-1
caaatggaaaatttgttttatcta

SEQ ID NO: 9466 - DNA, 24 bp, Sulfolobus virus SIRV-1
taaaatttttacatttgagaaatc

SEQ ID NO: 9467 - DNA, 18 bp, Homo sapiens
caaaaggaaaacttattt

SEQ ID NO: 9468 - DNA, 17 bp, Homo sapiens
caaatggaatgttctat

SEQ ID NO: 9469 - DNA, 19 bp, Homo sapiens
caaatagaaaatttgtcct

SEQ ID NO: 9470 - DNA, 21 bp, Homo sapiens
caaatggacagtttggatcta

SEQ ID NO: 9471 - DNA, 18 bp, Homo sapiens
gaaaatcctcttttatct

SEQ ID NO: 9472 - DNA, 23 bp, Homo sapiens
aaatgggtaaaaggtcttatcta

SEQ ID NO: 9473 - DNA, 19 bp, Homo sapiens
caaaatttttacaaagaga

SEQ ID NO: 9474 - DNA, 81 bp, Sulfolobus virus SIRV-1
taccagagtttcgtgatgatgatttgttatgtgatcctaaaaatcgcgattacatacaagctgcatgcgatgactttggta

SEQ ID NO: 9475 - DNA, 24 bp, Sulfolobus virus SIRV-1
tgatttgttatgtgatcctaaaaa

SEQ ID NO: 9476 - DNA, 24 bp, Sulfolobus virus SIRV-1
ttacatacaagctgcatgcgatga

SEQ ID NO: 9477 - DNA, 16 bp, Homo sapiens
tgattttaatcctaaa

SEQ ID NO: 9478 - DNA, 19 bp, Homo sapiens
tttgtattggtcctaaaaa

SEQ ID NO: 9479 - DNA, 20 bp, Homo sapiens
tatcattgtgatcctaaaaa

SEQ ID NO: 9480 - DNA, 23 bp, Homo sapiens
tgattagttgtgaatcctaaaaa

SEQ ID NO: 9481 - DNA, 21 bp, Homo sapiens
ttacatgcagctgaaaaatga

SEQ ID NO: 9482 - DNA, 17 bp, Homo sapiens
tacaagctgtggacatg

SEQ ID NO: 9483 - DNA, 16 bp, Homo sapiens
cacaagctgaagatga

SEQ ID NO: 9484 - DNA, 66 bp, Sulfolobus virus SIRV-1
accttctgagctgatggtctactgacctgatgatgaagaggatccgaagaccttggagctgaaggt

SEQ ID NO: 9485 - DNA, 24 bp, Sulfolobus virus SIRV-1
tccgaagaccttggagctgaaggt

SEQ ID NO: 9486 - DNA, 24 bp, Sulfolobus virus SIRV-1
tgatggtctactgacctgatgatg

SEQ ID NO: 9487 - DNA, 25 bp, Homo sapiens
cccgaaggtcaggactgctgagggt

SEQ ID NO: 9488 - DNA, 22 bp, Homo sapiens
tccggaactcgatattgaaggt

SEQ ID NO: 9489 - DNA, 25 bp, Homo sapiens
tccgaagagttttgtttgtggaggt

SEQ ID NO: 9490 - DNA, 21 bp, Homo sapiens
cccggagcgggagctgggggt

SEQ ID NO: 9491 - DNA, 20 bp, Homo sapiens
gaagcagcagagctggaggt

SEQ ID NO: 9492 - DNA, 17 bp, Homo sapiens
gaagagaagctgagggt

SEQ ID NO: 9493 - DNA, 18 bp, Homo sapiens
gaggccttggaagaaggt

SEQ ID NO: 9494 - DNA, 18 bp, Homo sapiens
tctgagagaagctgaggg

SEQ ID NO: 9495 - DNA, 22 bp, Homo sapiens
cggtggcaaagacctgatgatg

SEQ ID NO: 9496 - DNA, 87 bp, Sulfolobus virus SIRV-1
ggtactttctttgccaaaaaaaaagttgattgaagtcattttcacaagaattgatcagaaagtttttagcgtgtgtcaaagtgtgcc

SEQ ID NO: 9497 - DNA, 24 bp, Sulfolobus virus SIRV-1
agaaagtttttagcgtgtgtcaaa

SEQ ID NO: 9498 - DNA, 24 bp, Sulfolobus virus SIRV-1
tgattgaagtcattttcacaagaa

SEQ ID NO: 9499 - DNA, 22 bp, Homo sapiens
tgttgaagtccaaagacaagaa

SEQ ID NO: 9500 - DNA, 20 bp, Homo sapiens
attgagaaacttcacaagaa

SEQ ID NO: 9501 - DNA, 17 bp, Homo sapiens
gattgaagtctcagaag

SEQ ID NO: 9502 - DNA, 19 bp, Homo sapiens
tgggtgaagtcatttttac

SEQ ID NO: 9503 - DNA, 23 bp, Homo sapiens
tgattgaggtcataaattaagaa

SEQ ID NO: 9504 - DNA, 17 bp, Homo sapiens
tgattcaagctcacaag

SEQ ID NO: 9505 - DNA, 22 bp, Homo sapiens
tgattgaaaactttcacaagaa

SEQ ID NO: 9506 - DNA, 65 bp, Sulfolobus virus SIRV-1
ttgataacagttgaaagccaaatatttgccaaaatcggtttcaatttgcgtttcgctgttgccaa

SEQ ID NO: 9507 - DNA, 24 bp, Sulfolobus virus SIRV-1
ttgaaagccaaatatttgccaaaa

SEQ ID NO: 9508 - DNA, 24 bp, Sulfolobus virus SIRV-1
tttcaatttgcgtttcgctgttgc

SEQ ID NO: 9509 - DNA, 15 bp, Homo sapiens
tttacatgctgttgc

SEQ ID NO: 9510 - DNA, 24 bp, Homo sapiens
tttcaatttctgtttacgttttgc

SEQ ID NO: 9511 - DNA, 23 bp, Homo sapiens
tttcacatttgtgttcttgttgc

SEQ ID NO: 9512 - DNA, 19 bp, Homo sapiens
tttcaattttgttttccgc

SEQ ID NO: 9513 - DNA, 101 bp, Rat cytomegalovirus
actttcatcctgatcacctgtatcctctctctactctacgtgatcggtgacggtaacgagattgaagagacagacaacgggacaggtgagacaatgaaggt

SEQ ID NO: 9514 - DNA, 24 bp, Rat cytomegalovirus
taacgagattgaagagacagacaa

SEQ ID NO: 9515 - DNA, 24 bp, Rat cytomegalovirus
cacctgtatcctctctctactcta

SEQ ID NO: 9516 - DNA, 19 bp, Homo sapiens
cctgtatccaactgttcta

SEQ ID NO: 9517 - DNA, 18 bp, Homo sapiens
cctgcccttctctgctct

SEQ ID NO: 9518 - DNA, 19 bp, Homo sapiens
cacctgtaatctcagcact

SEQ ID NO: 9519 - DNA, 19 bp, Homo sapiens
cctgtatcccttttactct

SEQ ID NO: 9520 - DNA, 20 bp, Homo sapiens
tgtattttctctccacttct

SEQ ID NO: 9521 - DNA, 19 bp, Homo sapiens
cacctgtaatcctagaact

SEQ ID NO: 9522 - DNA, 22 bp, Homo sapiens
cacctgtagtcccagctactct

SEQ ID NO: 9523 - DNA, 17 bp, Homo sapiens
ctgtgtcctctctcacc

SEQ ID NO: 9524 - DNA, 21 bp, Homo sapiens
cctgtgtcctctcccctttct

SEQ ID NO: 9525 - DNA, 21 bp, Homo sapiens
acctgtattttttccatctct

SEQ ID NO: 9526 - DNA, 24 bp, Homo sapiens
cacttgtatctgttaaccactcta

SEQ ID NO: 9527 - DNA, 21 bp, Homo sapiens
cacctgtgcattctctactct

SEQ ID NO: 9528 - DNA, 21 bp, Homo sapiens
caccagtgtcctccccttcta

SEQ ID NO: 9529 - DNA, 17 bp, Homo sapiens
cacttgtgtctctctct

SEQ ID NO: 9530 - DNA, 18 bp, Homo sapiens
ctgtcttctctacctcta

SEQ ID NO: 9531 - DNA, 18 bp, Homo sapiens
ctgtgttctctccatcct

SEQ ID NO: 9532 - DNA, 18 bp, Homo sapiens
acctgtatcatcttttct

SEQ ID NO: 9533 - DNA, 64 bp, Rat cytomegalovirus
gagaggtgtaaaagatatatggctcgatcagctgatacaccgccaccgtaaaaccacgcctctc

SEQ ID NO: 9534 - DNA, 24 bp, Rat cytomegalovirus
tacaccgccaccgtaaaaccacgc

SEQ ID NO: 9535 - DNA, 24 bp, Rat cytomegalovirus
gaggtgtaaaagatatatggctcg

SEQ ID NO: 9536 - DNA, 19 bp, Homo sapiens
gaggtgtagaaatggtatg

SEQ ID NO: 9537 - DNA, 23 bp, Homo sapiens
gaggtgtaaagacacatggctcg

SEQ ID NO: 9538 - DNA, 17 bp, Homo sapiens
ggttggaagatatggct

SEQ ID NO: 9539 - DNA, 22 bp, Homo sapiens
gagggtgaaagatatccatact

SEQ ID NO: 9540 - DNA, 16 bp, Homo sapiens
gagctgtaaaagggct

SEQ ID NO: 9541 - DNA, 80 bp, Rat cytomegalovirus
ccgccattttaagtagctgacgtcaaggattgacgtaaaggttaaaggtcatcctcggcggaagctacacaaaatggtgg

SEQ ID NO: 9542 - DNA, 24 bp, Rat cytomegalovirus
aagtagctgacgtcaaggattgac

SEQ ID NO: 9543 - DNA, 24 bp, Rat cytomegalovirus
catcctcggcggaagctacacaaa

SEQ ID NO: 9544 - DNA, 16 bp, Homo sapiens
gtagctgacttggtga

SEQ ID NO: 9545 - DNA, 23 bp, Homo sapiens
aagtaactgttaggtgaggattg

SEQ ID NO: 9546 - DNA, 19 bp, Homo sapiens
aagtagctggtgtgaggat

SEQ ID NO: 9547 - DNA, 16 bp, Homo sapiens
gcggcacagggattga

SEQ ID NO: 9548 - DNA, 22 bp, Homo sapiens
agtggtgacttttgggattgac

SEQ ID NO: 9549 - DNA, 18 bp, Homo sapiens
agtagctggggttgggac

SEQ ID NO: 9550 - DNA, 18 bp, Homo sapiens
agtagctggcattacagg

SEQ ID NO: 9551 - DNA, 21 bp, Homo sapiens
aagtagctgactctcaattgg

SEQ ID NO: 9552 - DNA, 18 bp, Homo sapiens
catcctcgcggacacgca

SEQ ID NO: 9553 - DNA, 20 bp, Homo sapiens
catctcagcaggctgtacaa

SEQ ID NO: 9554 - DNA, 16 bp, Homo sapiens
ccagggagctatgcaa

SEQ ID NO: 9555 - DNA, 21 bp, Homo sapiens
cattctctccccagctacaca

SEQ ID NO: 9556 - DNA, 16 bp, Homo sapiens
acccttggcacgtaca

SEQ ID NO: 9557 - DNA, 21 bp, Homo sapiens
cagcctcagcatgggctgcac

SEQ ID NO: 9558 - DNA, 15 bp, Homo sapiens
tcctggaaagctaca

SEQ ID NO: 9559 - DNA, 18 bp, Homo sapiens
tcaacagaagttgcacaa

SEQ ID NO: 9560 - DNA, 18 bp, Homo sapiens
tcctcttggctacacaaa

SEQ ID NO: 9561 - DNA, 81 bp, Rat cytomegalovirus
gtgcgtacgtcacaagtcacgtggaggggacccgctgtaacccggaagtaggccccgtcacgtgacttaccacgtgtgtac

SEQ ID NO: 9562 - DNA, 24 bp, Rat cytomegalovirus
taggccccgtcacgtgacttacca

SEQ ID NO: 9563 - DNA, 24 bp, Rat cytomegalovirus
caagtcacgtggaggggacccgct

SEQ ID NO: 9564 - DNA, 16 bp, Homo sapiens
caagacatgggattcg

SEQ ID NO: 9565 - DNA, 19 bp, Homo sapiens
gtcgagtggaggactggct

SEQ ID NO: 9566 - DNA, 23 bp, Homo sapiens
caagtcactgcagctggcctgct

SEQ ID NO: 9567 - DNA, 131 bp, Rat cytomegalovirus
ccggcggacgcacctcgagagggccccgggcccgacggccgcggcgacgatgaggtcgcagatctcgaccccggaggcgccgtagggcgactcggaccgggccgcccgatcgaagatgccgttcctcccgg

SEQ ID NO: 9568 - DNA, 24 bp, Rat cytomegalovirus
gaccgggccgcccgatcgaagatg

SEQ ID NO: 9569 - DNA, 24 bp, Rat cytomegalovirus
gagggccccgggcccgacggccgc

SEQ ID NO: 9570 - DNA, 20 bp, Homo sapiens
gggcctgcccagcaaagatg

SEQ ID NO: 9571 - DNA, 18 bp, Homo sapiens
gaccgagctgctcgctcg

SEQ ID NO: 9572 - DNA, 14 bp, Homo sapiens
gagggcccgggcgc

SEQ ID NO: 9573 - DNA, 24 bp, Homo sapiens
gagggcccatgggctctgggttgc

SEQ ID NO: 9574 - DNA, 16 bp, Homo sapiens
gggccccggcctcggc

SEQ ID NO: 9575 - DNA, 14 bp, Homo sapiens
ggccccggacggcg

SEQ ID NO: 9576 - DNA, 16 bp, Homo sapiens
gggcccgggcccgggg

SEQ ID NO: 9577 - DNA, 23 bp, Homo sapiens
gggcgcctcggcagcgtggctgc

SEQ ID NO: 9578 - DNA, 18 bp, Homo sapiens
aggccccgggcccgcggc

SEQ ID NO: 9579 - DNA, 24 bp, Homo sapiens
gggccccgggtcctgtgcggccgc

SEQ ID NO: 9580 - DNA, 22 bp, Homo sapiens
gagggcccccgggccgctccgc

SEQ ID NO: 9581 - DNA, 19 bp, Homo sapiens
gagggccctgggtcccggc

SEQ ID NO: 9582 - DNA, 20 bp, Homo sapiens
gaggaccctgggctgagacc

SEQ ID NO: 9583 - DNA, 19 bp, Homo sapiens
gggtcctggggcccgagac

SEQ ID NO: 9584 - DNA, 19 bp, Homo sapiens
ggccccggggggtggctgc

SEQ ID NO: 9585 - DNA, 19 bp, Homo sapiens
ggaccccgggggcggtcgc

SEQ ID NO: 9586 - DNA, 18 bp, Homo sapiens
gagggcccggggcctggc

SEQ ID NO: 9587 - DNA, 15 bp, Homo sapiens
ggctccgggcccggc

SEQ ID NO: 9588 - DNA, 18 bp, Homo sapiens
gagggccctgggctgggg

SEQ ID NO: 9589 - DNA, 19 bp, Homo sapiens
gagggcccgggcccgcagc

SEQ ID NO: 9590 - DNA, 19 bp, Homo sapiens
gagggccctgggtccagcg

SEQ ID NO: 9591 - DNA, 23 bp, Homo sapiens
gggcccggcccgccggcggccgc

SEQ ID NO: 9592 - DNA, 22 bp, Homo sapiens
gggccccggctgcggcggccgc

SEQ ID NO: 9593 - DNA, 19 bp, Homo sapiens
gagcgcctcgtcacggccg

SEQ ID NO: 9594 - DNA, 20 bp, Homo sapiens
gagggcccgggcttcagtgc

SEQ ID NO: 9595 - DNA, 65 bp, Rat cytomegalovirus
gcagcatatggatatgtagaattttgtgcaaaaagtacaggagaccaaaacatacacatgaatgc

SEQ ID NO: 9596 - DNA, 24 bp, Rat cytomegalovirus
caggagaccaaaacatacacatga

SEQ ID NO: 9597 - DNA, 24 bp, Rat cytomegalovirus
gatatgtagaattttgtgcaaaaa

SEQ ID NO: 9598 - DNA, 27 bp, Homo sapiens
caagagactaaagtgtactaatgcatg

SEQ ID NO: 9599 - DNA, 18 bp, Homo sapiens
caggaactgctacacatg

SEQ ID NO: 9600 - DNA, 20 bp, Homo sapiens
cagggaatcaaaacattcac

SEQ ID NO: 9601 - DNA, 21 bp, Homo sapiens
ggcagccctggtgtacacatg

SEQ ID NO: 9602 - DNA, 21 bp, Homo sapiens
agattaaaaatgtacacatga

SEQ ID NO: 9603 - DNA, 18 bp, Homo sapiens
caggagactggacataca

SEQ ID NO: 9604 - DNA, 23 bp, Homo sapiens
caggagaccgcaatggccacgtg

SEQ ID NO: 9605 - DNA, 22 bp, Homo sapiens
agaggtcagagagcacacatga

SEQ ID NO: 9606 - DNA, 22 bp, Homo sapiens
agataccaaaacatacatgtga

SEQ ID NO: 9607 - DNA, 20 bp, Homo sapiens
gagaccaagaatatccatga

SEQ ID NO: 9608 - DNA, 20 bp, Homo sapiens
cagaagaccagggccccatg

SEQ ID NO: 9609 - DNA, 17 bp, Homo sapiens
tgtagaatgtgcaaaaa

SEQ ID NO: 9610 - DNA, 15 bp, Homo sapiens
gatatgtagcttgtg

SEQ ID NO: 9611 - DNA, 21 bp, Homo sapiens
gatgtgttctttgtgcaaaaa

SEQ ID NO: 9612 - DNA, 85 bp, Sulfolobus virus SIRV-1
ttggatcttgttctgttagtactggttgtccagatacgtaaacttctttctggaaaaatccagctaatgcagatatattattcgg

SEQ ID NO: 9613 - DNA, 24 bp, Sulfolobus virus SIRV-1
tggaaaaatccagctaatgcagat

SEQ ID NO: 9614 - DNA, 24 bp, Sulfolobus virus SIRV-1
ttagtactggttgtccagatacgt

SEQ ID NO: 9615 - DNA, 19 bp, Homo sapiens
tggagaaatccggcagcag

SEQ ID NO: 9616 - DNA, 21 bp, Homo sapiens
gaaaaatccatgacagcagat

SEQ ID NO: 9617 - DNA, 22 bp, Homo sapiens
ggaaatccaggccttggcagat

SEQ ID NO: 9618 - DNA, 19 bp, Homo sapiens
tggaaaaatgtatatgcag

SEQ ID NO: 9619 - DNA, 131 bp, Sulfolobus virus SIRV-1
cccgggctccccgttccccgagggtcccgggctccccgttccccgagggtcccgggctccccgttccccgagggtcccgggctccccgttccccgagggtcccgggctccccgttccccgagggtcccggg

SEQ ID NO: 9620 - DNA, 24 bp, Sulfolobus virus SIRV-1
ctccccgttccccgagggtcccgg

SEQ ID NO: 9621 - DNA, 24 bp, Sulfolobus virus SIRV-1
gagggtcccgggctccccgttccc

SEQ ID NO: 9622 - DNA, 17 bp, Homo sapiens
ctcctcgttcccctggg

SEQ ID NO: 9623 - DNA, 16 bp, Homo sapiens
cccgtgccccgaggcg

SEQ ID NO: 9624 - DNA, 18 bp, Homo sapiens
ctccccttctctccctgg

SEQ ID NO: 9625 - DNA, 25 bp, Homo sapiens
ctccccgttccgccggaggacctgg

SEQ ID NO: 9626 - DNA, 22 bp, Homo sapiens
ctccttggtccctgaggcctgg

SEQ ID NO: 9627 - DNA, 19 bp, Homo sapiens
ccgttccctagaacagcgg

SEQ ID NO: 9628 - DNA, 18 bp, Homo sapiens
cctgtcctgggggtcccg

SEQ ID NO: 9629 - DNA, 15 bp, Homo sapiens
cccgttccctcctca

SEQ ID NO: 9630 - DNA, 22 bp, Homo sapiens
cctggtctcctgggggtcccgg

SEQ ID NO: 9631 - DNA, 22 bp, Homo sapiens
ctctccgctccccgagcctcgg

SEQ ID NO: 9632 - DNA, 17 bp, Homo sapiens
gtcccccacaattccgg

SEQ ID NO: 9633 - DNA, 26 bp, Homo sapiens
ctcatcccgggccccgggggtcctgg

SEQ ID NO: 9634 - DNA, 24 bp, Homo sapiens
ctgcctgtggagaaagggtcctgg

SEQ ID NO: 9635 - DNA, 26 bp, Homo sapiens
ctccccgctccctggcagccacctgg

SEQ ID NO: 9636 - DNA, 17 bp, Homo sapiens
ctcctcttccccctccg

SEQ ID NO: 9637 - DNA, 19 bp, Homo sapiens
tcccggttccccgcgctgg

SEQ ID NO: 9638 - DNA, 21 bp, Homo sapiens
ctccccattctccctgcctgg

SEQ ID NO: 9639 - DNA, 28 bp, Homo sapiens
ctccccgttctccgggcgagcttctcgg

SEQ ID NO: 9640 - DNA, 18 bp, Homo sapiens
tccctgttccaggttctg

SEQ ID NO: 9641 - DNA, 24 bp, Homo sapiens
ctccttttccccgaagggttccgg

SEQ ID NO: 9642 - DNA, 15 bp, Homo sapiens
ctccccttccctccc

SEQ ID NO: 9643 - DNA, 18 bp, Homo sapiens
aggtcccttgccccgttc

SEQ ID NO: 9644 - DNA, 20 bp, Homo sapiens
gggccccgggctctgcatcc

SEQ ID NO: 9645 - DNA, 22 bp, Homo sapiens
gagggccctggaccctctgttc

SEQ ID NO: 9646 - DNA, 19 bp, Homo sapiens
aagggtcctgtcctcgttc

SEQ ID NO: 9647 - DNA, 19 bp, Homo sapiens
gagggtcctgggccagccc

SEQ ID NO: 9648 - DNA, 19 bp, Homo sapiens
agggtcccgggctccggcc

SEQ ID NO: 9649 - DNA, 19 bp, Homo sapiens
gagggtcccggctcccacc

SEQ ID NO: 9650 - DNA, 22 bp, Homo sapiens
gaggctccgaagctccgttccc

SEQ ID NO: 9651 - DNA, 24 bp, Homo sapiens
gagggtcccaggctgggccttctc

SEQ ID NO: 9652 - DNA, 23 bp, Homo sapiens
gagggtccttgcaatgcctgttc

SEQ ID NO: 9653 - DNA, 66 bp, Human adenovirus C
ggcctagagaaggagagggagctctatctaaagaagatccgctccatggagtctcagctgcaggcc

SEQ ID NO: 9654 - DNA, 24 bp, Human adenovirus C
ccgctccatggagtctcagctgca

SEQ ID NO: 9655 - DNA, 24 bp, Human adenovirus C
gagaaggagagggagctctatcta

SEQ ID NO: 9656 - DNA, 19 bp, Homo sapiens
gaggaggaagggagcacta

SEQ ID NO: 9657 - DNA, 19 bp, Homo sapiens
gagagggaggtggggccct

SEQ ID NO: 9658 - DNA, 21 bp, Homo sapiens
gagggagggggactcccccta

SEQ ID NO: 9659 - DNA, 23 bp, Homo sapiens
gagggggtgaggggacagcatct

SEQ ID NO: 9660 - DNA, 21 bp, Homo sapiens
gagaaggggagggacctgtct

SEQ ID NO: 9661 - DNA, 18 bp, Homo sapiens
gagaagagagggagttcc

SEQ ID NO: 9662 - DNA, 23 bp, Homo sapiens
gagaggggcagggagcccactct

SEQ ID NO: 9663 - DNA, 19 bp, Homo sapiens
gatgggagggagcacgtct

SEQ ID NO: 9664 - DNA, 18 bp, Homo sapiens
gaagggaggggaagttct

SEQ ID NO: 9665 - DNA, 18 bp, Homo sapiens
gaggtggagagggaggct

SEQ ID NO: 9666 - DNA, 21 bp, Homo sapiens
gagaaggggaggggggaggct

SEQ ID NO: 9667 - DNA, 19 bp, Homo sapiens
gggaggagagggagatgct

SEQ ID NO: 9668 - DNA, 18 bp, Homo sapiens
gaatggagagattatcta

SEQ ID NO: 9669 - DNA, 22 bp, Homo sapiens
gaggaggagggagagtgtctct

SEQ ID NO: 9670 - DNA, 19 bp, Homo sapiens
gagaaggggtgggagggcc

SEQ ID NO: 9671 - DNA, 16 bp, Homo sapiens
gagggagagggggctc

SEQ ID NO: 9672 - DNA, 17 bp, Homo sapiens
gagagggagggagatct

SEQ ID NO: 9673 - DNA, 22 bp, Homo sapiens
gaggaggagaggaggaggcgct

SEQ ID NO: 9674 - DNA, 21 bp, Homo sapiens
gagaggagagaggagccctat

SEQ ID NO: 9675 - DNA, 22 bp, Homo sapiens
gagagggagggaaaagatgtct

SEQ ID NO: 9676 - DNA, 18 bp, Homo sapiens
gagggggagaggatatct

SEQ ID NO: 9677 - DNA, 19 bp, Homo sapiens
gagggggagagtgagtgct

SEQ ID NO: 9678 - DNA, 19 bp, Homo sapiens
gagagggagaggaaaccct

SEQ ID NO: 9679 - DNA, 22 bp, Homo sapiens
gagggagggagggagaggccct

SEQ ID NO: 9680 - DNA, 20 bp, Homo sapiens
gagagggagagggagaccac

SEQ ID NO: 9681 - DNA, 25 bp, Homo sapiens
gagaaggggggaggggacaggctct

SEQ ID NO: 9682 - DNA, 22 bp, Homo sapiens
gagaggaggtcccgctttatct

SEQ ID NO: 9683 - DNA, 17 bp, Homo sapiens
agaagagggaccattct

SEQ ID NO: 9684 - DNA, 23 bp, Homo sapiens
ggagaggggcagctgctttgtct

SEQ ID NO: 9685 - DNA, 18 bp, Homo sapiens
ggaggtgggggagcccta

SEQ ID NO: 9686 - DNA, 22 bp, Homo sapiens
gagaggggaagggagtagacta

SEQ ID NO: 9687 - DNA, 18 bp, Homo sapiens
gaggggaggggggcagct

SEQ ID NO: 9688 - DNA, 20 bp, Homo sapiens
gagggagaggtgagctccac

SEQ ID NO: 9689 - DNA, 18 bp, Homo sapiens
gagaggagggtgctgtct

SEQ ID NO: 9690 - DNA, 20 bp, Homo sapiens
gagggagagagaggctttct

SEQ ID NO: 9691 - DNA, 20 bp, Homo sapiens
gggaagggaggccctatcta

SEQ ID NO: 9692 - DNA, 19 bp, Homo sapiens
gaggaggagaggagatcta

SEQ ID NO: 9693 - DNA, 17 bp, Homo sapiens
aagaggggagggagtct

SEQ ID NO: 9694 - DNA, 22 bp, Homo sapiens
gaagagggagggctcagatcta

SEQ ID NO: 9695 - DNA, 20 bp, Homo sapiens
gagaagaggaaagattttct

SEQ ID NO: 9696 - DNA, 18 bp, Homo sapiens
agagggaggtgtctgtct

SEQ ID NO: 9697 - DNA, 19 bp, Homo sapiens
gagaaggggtgggagctct

SEQ ID NO: 9698 - DNA, 22 bp, Homo sapiens
aggagaggtcaccttctatcta

SEQ ID NO: 9699 - DNA, 19 bp, Homo sapiens
gagaaagttgccgggagct

SEQ ID NO: 9700 - DNA, 19 bp, Homo sapiens
gagggagagagggggcgcc

SEQ ID NO: 9701 - DNA, 20 bp, Homo sapiens
ggagccacgaggagctttat

SEQ ID NO: 9702 - DNA, 19 bp, Homo sapiens
aggagagggaatctcatct

SEQ ID NO: 9703 - DNA, 18 bp, Homo sapiens
gaggaagagggggcttcc

SEQ ID NO: 9704 - DNA, 19 bp, Homo sapiens
aagaggaaagtggctttat

SEQ ID NO: 9705 - DNA, 25 bp, Homo sapiens
gagggggagagggagggcacattct

SEQ ID NO: 9706 - DNA, 74 bp, Human adenovirus C
gttggaaacttactcgccaccccccacccgctgggaaagccggcatcatcgagggtgggcacaatagttctagc

SEQ ID NO: 9707 - DNA, 24 bp, Human adenovirus C
tggaaacttactcgccacccccca

SEQ ID NO: 9708 - DNA, 20 bp, Human adenovirus C
gtgggcacaatagttctagc

SEQ ID NO: 9709 - DNA, 22 bp, Homo sapiens
tggaaactcacttctaccttcc

SEQ ID NO: 9710 - DNA, 21 bp, Homo sapiens
agaaggcactgtcacccccca

SEQ ID NO: 9711 - DNA, 21 bp, Homo sapiens
ggacgctccccccacccccca

SEQ ID NO: 9712 - DNA, 20 bp, Homo sapiens
tggggacctcggcacccccc

SEQ ID NO: 9713 - DNA, 24 bp, Homo sapiens
tggaaacctattaacatgccttcc

SEQ ID NO: 9714 - DNA, 24 bp, Homo sapiens
tgggggtgtaggcgtcacccccca

SEQ ID NO: 9715 - DNA, 25 bp, Homo sapiens
tgaaaacttgctcagtgtgccttcc

SEQ ID NO: 9716 - DNA, 19 bp, Homo sapiens
gaaatccacgccgcccccc

SEQ ID NO: 9717 - DNA, 20 bp, Homo sapiens
tggaaactttatttcctccc

SEQ ID NO: 9718 - DNA, 21 bp, Homo sapiens
tagaaactttgacacccctca

SEQ ID NO: 9719 - DNA, 18 bp, Homo sapiens
tggaaacttgcccttcca

SEQ ID NO: 9720 - DNA, 21 bp, Homo sapiens
gtggacacaggagtttctggc

SEQ ID NO: 9721 - DNA, 18 bp, Homo sapiens
gtgggcacaggagaaagc

SEQ ID NO: 9722 - DNA, 18 bp, Homo sapiens
gtgggcacacgtgccact

SEQ ID NO: 9723 - DNA, 17 bp, Homo sapiens
gcgggcacaatcacagc

SEQ ID NO: 9724 - DNA, 17 bp, Homo sapiens
gtgggcactggagtagc

SEQ ID NO: 9725 - DNA, 15 bp, Homo sapiens
atgggcacagtgcag

SEQ ID NO: 9726 - DNA, 18 bp, Homo sapiens
ggcgaccatggttctagc

SEQ ID NO: 9727 - DNA, 18 bp, Homo sapiens
gtagtgcttggttctagc

SEQ ID NO: 9728 - DNA, 15 bp, Homo sapiens
cgggatagttctggc

SEQ ID NO: 9729 - DNA, 17 bp, Homo sapiens
gtggacacaaatctagc

SEQ ID NO: 9730 - DNA, 14 bp, Homo sapiens
gtgggatgtcctag

SEQ ID NO: 9731 - DNA, 18 bp, Homo sapiens
gtgggctgcagttccagc

SEQ ID NO: 9732 - DNA, 16 bp, Homo sapiens
gtgggcacagttccag

SEQ ID NO: 9733 - DNA, 17 bp, Homo sapiens
tgggcacagtgcctggc

SEQ ID NO: 9734 - DNA, 19 bp, Homo sapiens
gtggtgcttcaagttctag

SEQ ID NO: 9735 - DNA, 16 bp, Homo sapiens
gggcacaagttctggc

SEQ ID NO: 9736 - DNA, 17 bp, Homo sapiens
gtggagtgaattctagc

SEQ ID NO: 9737 - DNA, 18 bp, Homo sapiens
gtggatctatagttctag

SEQ ID NO: 9738 - DNA, 18 bp, Homo sapiens
gtgggcacagggtcatag

SEQ ID NO: 9739 - DNA, 69 bp, Human adenovirus C
ccggtggaactcgtgacagatgtctacgccaccctaggcatcgtggagatcatcgacgagctctaccgg

SEQ ID NO: 9740 - DNA, 24 bp, Human adenovirus C
catcgtggagatcatcgacgagct

SEQ ID NO: 9741 - DNA, 24 bp, Human adenovirus C
tggaactcgtgacagatgtctacg

SEQ ID NO: 9742 - DNA, 21 bp, Homo sapiens
tgggtttgtgacagacagacc

SEQ ID NO: 9743 - DNA, 18 bp, Homo sapiens
tggggtgaggagatgtct

SEQ ID NO: 9744 - DNA, 19 bp, Homo sapiens
tggtgctgttggatgtcta

SEQ ID NO: 9745 - DNA, 17 bp, Homo sapiens
tggggctctgacagatg

SEQ ID NO: 9746 - DNA, 18 bp, Homo sapiens
tggagtccgtgacaggtc

SEQ ID NO: 9747 - DNA, 74 bp, Human adenovirus C
agtttgccatgctacagtttgcatacgatcacatccaatcccacgtcaatgaaatgctaagtagaatagcaact

SEQ ID NO: 9748 - DNA, 24 bp, Human adenovirus C
gctacagtttgcatacgatcacat

SEQ ID NO: 9749 - DNA, 24 bp, Human adenovirus C
tgaaatgctaagtagaatagcaac

SEQ ID NO: 9750 - DNA, 21 bp, Homo sapiens
tacagtgagctatgatcacat

SEQ ID NO: 9751 - DNA, 19 bp, Homo sapiens
gctgtatttgcataaacca

SEQ ID NO: 9752 - DNA, 19 bp, Homo sapiens
gctatggtttgcattcaat

SEQ ID NO: 9753 - DNA, 19 bp, Homo sapiens
cagtggtgcacgatcacat

SEQ ID NO: 9754 - DNA, 17 bp, Homo sapiens
gctaagtttgcaaccac

SEQ ID NO: 9755 - DNA, 101 bp, Human adenovirus C
gcgcaagctgatcgagccgtgcgccctcaatcagaagcgctactttaagtttggcaaagagtacgtttactacgagaactacacgttcgtccgcaaagtgc

SEQ ID NO: 9756 - DNA, 24 bp, Human adenovirus C
agagtacgtttactacgagaacta

SEQ ID NO: 9757 - DNA, 24 bp, Human adenovirus C
aagctgatcgagccgtgcgccctc

SEQ ID NO: 9758 - DNA, 21 bp, Homo sapiens
agatacgtttacaataaagaa

SEQ ID NO: 9759 - DNA, 21 bp, Homo sapiens
gagatagtcttatgagaacta

SEQ ID NO: 9760 - DNA, 20 bp, Homo sapiens
aggtaacatctgcgagaact

SEQ ID NO: 9761 - DNA, 21 bp, Homo sapiens
agggtcgtttaccgtcgaact

SEQ ID NO: 9762 - DNA, 102 bp, Rat cytomegalovirus
catgtgcagcactggaagtgtttacgcatagaagcagccttattatttaaggctcgtgaaatgggctatgcacaagtaggacatcaaatagtgccagcactg

SEQ ID NO: 9763 - DNA, 24 bp, Rat cytomegalovirus
tttacgcatagaagcagccttatt

SEQ ID NO: 9764 - DNA, 24 bp, Rat cytomegalovirus
taggacatcaaatagtgccagcac

SEQ ID NO: 9765 - DNA, 19 bp, Homo sapiens
aggtacaatagtgctagca

SEQ ID NO: 9766 - DNA, 22 bp, Homo sapiens
taggacatcaaaggaaatagta

SEQ ID NO: 9767 - DNA, 20 bp, Homo sapiens
ggcaatatcatggccagcac

SEQ ID NO: 9768 - DNA, 21 bp, Homo sapiens
taggacacagataagaacaag

SEQ ID NO: 9769 - DNA, 23 bp, Homo sapiens
taggacatctaattagagagtgc

SEQ ID NO: 9770 - DNA, 18 bp, Homo sapiens
gggggtcaaatagtcagc

SEQ ID NO: 9771 - DNA, 18 bp, Homo sapiens
ggacatcaagaatggtgc

SEQ ID NO: 9772 - DNA, 18 bp, Homo sapiens
gagccaagatagtgccag

SEQ ID NO: 9773 - DNA, 20 bp, Homo sapiens
taggacattaacatagccca

SEQ ID NO: 9774 - DNA, 22 bp, Homo sapiens
gatatcaaatagcaactggcac

SEQ ID NO: 9775 - DNA, 67 bp, Rat cytomegalovirus
tgctgctgtggtttttagccacagtgtttatttgtatattagtactgttgttaaactactgcagaca

SEQ ID NO: 9776 - DNA, 24 bp, Rat cytomegalovirus
tgtggtttttagccacagtgttta

SEQ ID NO: 9777 - DNA, 24 bp, Rat cytomegalovirus
tactgttgttaaactactgcagac

SEQ ID NO: 9778 - DNA, 15 bp, Homo sapiens
actgttgtactgcag

SEQ ID NO: 9779 - DNA, 21 bp, Homo sapiens
tgctgtcactctgctgcagac

SEQ ID NO: 9780 - DNA, 19 bp, Homo sapiens
ctgttgcttaggctgccgc

SEQ ID NO: 9781 - DNA, 17 bp, Homo sapiens
ctgttgttaattacaaa

SEQ ID NO: 9782 - DNA, 21 bp, Homo sapiens
tgatgtccagctgctgcagac

SEQ ID NO: 9783 - DNA, 21 bp, Homo sapiens
tcctcaaaagactactgcaga

SEQ ID NO: 9784 - DNA, 18 bp, Homo sapiens
ttgctcaactactgcaga

SEQ ID NO: 9785 - DNA, 23 bp, Homo sapiens
taattgcctgaactactgtggac

SEQ ID NO: 9786 - DNA, 61 bp, Tupaia herpesvirus
gatgtaatgtccgtattcttcaggtatctgtcggaaccagtcgagtatagttcgttgaatc

SEQ ID NO: 9787 - DNA, 24 bp, Tupaia herpesvirus
tgtaatgtccgtattcttcaggta

SEQ ID NO: 9788 - DNA, 20 bp, Tupaia herpesvirus
cgagtatagttcgttgaatc

SEQ ID NO: 9789 - DNA, 16 bp, Homo sapiens
gagtgatcgctgaatc

SEQ ID NO: 9790 - DNA, 19 bp, Homo sapiens
agtacatttttgttgaatc

SEQ ID NO: 9791 - DNA, 17 bp, Homo sapiens
cgggtataagctgaatc

SEQ ID NO: 9792 - DNA, 19 bp, Homo sapiens
gagataattttgttgaatc

SEQ ID NO: 9793 - DNA, 17 bp, Homo sapiens
gagtatagtcccagaat

SEQ ID NO: 9794 - DNA, 60 bp, Tupaia herpesvirus
gttgctgttcgtgtcgcgaagctagttttgagtcgtaattgcagcaggcagagcagcagc

SEQ ID NO: 9795 - DNA, 24 bp, Tupaia herpesvirus
ttgagtcgtaattgcagcaggcag

SEQ ID NO: 9796 - DNA, 24 bp, Tupaia herpesvirus
tgctgttcgtgtcgcgaagctagt

SEQ ID NO: 9797 - DNA, 19 bp, Homo sapiens
tgctgttcttgttgctgct

SEQ ID NO: 9798 - DNA, 88 bp, Tupaia herpesvirus
gcgggtcgtcgcggggactggtttggcgtgcgtacgtacgtgtttctgcacggctccggccgccgcttcggcctccctgcacgcccgc

SEQ ID NO: 9799 - DNA, 24 bp, Tupaia herpesvirus
actggtttggcgtgcgtacgtacg

SEQ ID NO: 9800 - DNA, 24 bp, Tupaia herpesvirus
ccgcttcggcctccctgcacgccc

SEQ ID NO: 9801 - DNA, 22 bp, Homo sapiens
ccgccttggcctcccaaagtgc

SEQ ID NO: 9802 - DNA, 18 bp, Homo sapiens
gcttggcctccctggtcc

SEQ ID NO: 9803 - DNA, 23 bp, Homo sapiens
ccgctccgcgcctttgcacgccc

SEQ ID NO: 9804 - DNA, 19 bp, Homo sapiens
ccgcttcggccgccgggcc

SEQ ID NO: 9805 - DNA, 19 bp, Homo sapiens
gctccggctcgcccgcgcc

SEQ ID NO: 9806 - DNA, 20 bp, Homo sapiens
cgcttcggggctgcgcgccc

SEQ ID NO: 9807 - DNA, 18 bp, Homo sapiens
ccgcttcgccttctcctg

SEQ ID NO: 9808 - DNA, 22 bp, Homo sapiens
cctgggccctccctgcgtgccc

SEQ ID NO: 9809 - DNA, 19 bp, Homo sapiens
ccgcttcgcctcgaccgcc

SEQ ID NO: 9810 - DNA, 16 bp, Homo sapiens
cttcggcttccccggc

SEQ ID NO: 9811 - DNA, 16 bp, Homo sapiens
ccgctcggccctgcgc

SEQ ID NO: 9812 - DNA, 24 bp, Homo sapiens
ccgcttcgccttctccgctgctgc

SEQ ID NO: 9813 - DNA, 22 bp, Homo sapiens
ccgcctcggcctccccaagtgc

SEQ ID NO: 9814 - DNA, 23 bp, Homo sapiens
ccgctccggcctcctgcgctgcc

SEQ ID NO: 9815 - DNA, 21 bp, Homo sapiens
gcctcggcctcccccgtggcc

SEQ ID NO: 9816 - DNA, 20 bp, Homo sapiens
gctaggcctccctgcacgcc

SEQ ID NO: 9817 - DNA, 19 bp, Homo sapiens
ccttttcggtctctcctac

SEQ ID NO: 9818 - DNA, 20 bp, Homo sapiens
gcttcagcttccccaaatcc

SEQ ID NO: 9819 - DNA, 22 bp, Homo sapiens
ccgccttggcctcccaaagtcc

SEQ ID NO: 9820 - DNA, 22 bp, Homo sapiens
ccgtttggcttcccaaggatcc

SEQ ID NO: 9821 - DNA, 18 bp, Homo sapiens
gcttcggcctccctgggc

SEQ ID NO: 9822 - DNA, 87 bp, African swine fever virus
gtggtggaatatatgttgacgcagtcggcgactcggcagagcgatctggagcggctcgaggcgcacgatcggctgctgtttcattac

SEQ ID NO: 9823 - DNA, 24 bp, African swine fever virus
tggaatatatgttgacgcagtcgg

SEQ ID NO: 9824 - DNA, 24 bp, African swine fever virus
gcgcacgatcggctgctgtttcat

SEQ ID NO: 9825 - DNA, 15 bp, Homo sapiens
gcgcggtcgctgctc

SEQ ID NO: 9826 - DNA, 62 bp, Melanoplus sanguinipes entomopoxvirus
ggccccctcccgagctggggcccggatccccgacctccccggccccctcccgagctggggcc

SEQ ID NO: 9827 - DNA, 23 bp, Melanoplus sanguinipes entomopoxvirus
cggccccctcccgagctggggcc

SEQ ID NO: 9828 - DNA, 24 bp, Melanoplus sanguinipes entomopoxvirus
cctcccgagctggggcccggatcc

SEQ ID NO: 9829 - DNA, 22 bp, Homo sapiens
gcttctttccagcactggggcc

SEQ ID NO: 9830 - DNA, 20 bp, Homo sapiens
cggccccctcctcgacagct

SEQ ID NO: 9831 - DNA, 22 bp, Homo sapiens
cagcctcccaagtagctggggc

SEQ ID NO: 9832 - DNA, 21 bp, Homo sapiens
gctccctcctgaagccaggcc

SEQ ID NO: 9833 - DNA, 20 bp, Homo sapiens
ggtcccctcccacccaggcc

SEQ ID NO: 9834 - DNA, 17 bp, Homo sapiens
ggtgccctcccgagtgg

SEQ ID NO: 9835 - DNA, 17 bp, Homo sapiens
cggcctcgttccggggc

SEQ ID NO: 9836 - DNA, 19 bp, Homo sapiens
cggcccccatctcggcggc

SEQ ID NO: 9837 - DNA, 18 bp, Homo sapiens
cagccccctcccggcagc

SEQ ID NO: 9838 - DNA, 19 bp, Homo sapiens
ggccccttcctgccccgcc

SEQ ID NO: 9839 - DNA, 15 bp, Homo sapiens
gcctccctcctgggg

SEQ ID NO: 9840 - DNA, 15 bp, Homo sapiens
ggcctctcctggggc

SEQ ID NO: 9841 - DNA, 21 bp, Homo sapiens
cgggtcctctcccctggggcc

SEQ ID NO: 9842 - DNA, 17 bp, Homo sapiens
ggccccctcctggaagc

SEQ ID NO: 9843 - DNA, 17 bp, Homo sapiens
gcctccctcccacgggc

SEQ ID NO: 9844 - DNA, 21 bp, Homo sapiens
cagtccctgtaggctggggcc

SEQ ID NO: 9845 - DNA, 20 bp, Homo sapiens
cagcccttcaagagctgggg

SEQ ID NO: 9846 - DNA, 14 bp, Homo sapiens
ggccccctcccggg

SEQ ID NO: 9847 - DNA, 22 bp, Homo sapiens
ggtctcctcctgtcactggggc

SEQ ID NO: 9848 - DNA, 18 bp, Homo sapiens
cagctccttggctggggc

SEQ ID NO: 9849 - DNA, 19 bp, Homo sapiens
ggctttcctaggctggggc

SEQ ID NO: 9850 - DNA, 18 bp, Homo sapiens
ccccctcccaggagggcc

SEQ ID NO: 9851 - DNA, 21 bp, Homo sapiens
ggccccctcctgagggcggcc

SEQ ID NO: 9852 - DNA, 18 bp, Homo sapiens
cggctccctcccgcccgc

SEQ ID NO: 9853 - DNA, 19 bp, Homo sapiens
cggccccctggctggggcc

SEQ ID NO: 9854 - DNA, 16 bp, Homo sapiens
agccttgagctggggc

SEQ ID NO: 9855 - DNA, 17 bp, Homo sapiens
cagccccctcccatggg

SEQ ID NO: 9856 - DNA, 18 bp, Homo sapiens
ggcctcatttctgggacc

SEQ ID NO: 9857 - DNA, 16 bp, Homo sapiens
gcccctctcctgggac

SEQ ID NO: 9858 - DNA, 19 bp, Homo sapiens
cggcccctccctggaaacc

SEQ ID NO: 9859 - DNA, 19 bp, Homo sapiens
cggtcctcggggctggggc

SEQ ID NO: 9860 - DNA, 22 bp, Homo sapiens
cggccccccttcctcgagggcc

SEQ ID NO: 9861 - DNA, 15 bp, Homo sapiens
cagccctagctgggg

SEQ ID NO: 9862 - DNA, 19 bp, Homo sapiens
ggcccccttcagtttgggc

SEQ ID NO: 9863 - DNA, 17 bp, Homo sapiens
cagcccctcgctggggc

SEQ ID NO: 9864 - DNA, 19 bp, Homo sapiens
ggcctctgtccctggggcc

SEQ ID NO: 9865 - DNA, 21 bp, Homo sapiens
ggcctcttccccaccagggcc

SEQ ID NO: 9866 - DNA, 17 bp, Homo sapiens
ggccagcgagctggggc

SEQ ID NO: 9867 - DNA, 21 bp, Homo sapiens
cagccccctcctggtcttagc

SEQ ID NO: 9868 - DNA, 19 bp, Homo sapiens
ggtcccctccctgagggcc

SEQ ID NO: 9869 - DNA, 17 bp, Homo sapiens
gcccccctcctccgggg

SEQ ID NO: 9870 - DNA, 15 bp, Homo sapiens
cggccccctcccggg

SEQ ID NO: 9871 - DNA, 20 bp, Homo sapiens
ggtccccttggcctggggcc

SEQ ID NO: 9872 - DNA, 17 bp, Homo sapiens
gcctcttcccgagcggc

SEQ ID NO: 9873 - DNA, 19 bp, Homo sapiens
cagttccctcccggggggc

SEQ ID NO: 9874 - DNA, 20 bp, Homo sapiens
ggtctcctagggagctgggg

SEQ ID NO: 9875 - DNA, 17 bp, Homo sapiens
ggccatctctccagggc

SEQ ID NO: 9876 - DNA, 21 bp, Homo sapiens
ggcttcagggaggctggggcc

SEQ ID NO: 9877 - DNA, 21 bp, Homo sapiens
cggcctcccaaagtgctgggg

SEQ ID NO: 9878 - DNA, 15 bp, Homo sapiens
cggccccctctgcgg

SEQ ID NO: 9879 - DNA, 17 bp, Homo sapiens
gcccctctcactggggc

SEQ ID NO: 9880 - DNA, 18 bp, Homo sapiens
cagctccctcccatgggc

SEQ ID NO: 9881 - DNA, 19 bp, Homo sapiens
ggcccggcggggctggggc

SEQ ID NO: 9882 - DNA, 20 bp, Homo sapiens
ggccttgtcccgagcgggac

SEQ ID NO: 9883 - DNA, 22 bp, Homo sapiens
gctctctcttgaacccggggcc

SEQ ID NO: 9884 - DNA, 16 bp, Homo sapiens
ggccccctctctgtgc

SEQ ID NO: 9885 - DNA, 20 bp, Homo sapiens
ggctggggccgggctggggc

SEQ ID NO: 9886 - DNA, 21 bp, Homo sapiens
ggccccctgcttggcttggcc

SEQ ID NO: 9887 - DNA, 20 bp, Homo sapiens
cagccccctctccctggggc

SEQ ID NO: 9888 - DNA, 19 bp, Homo sapiens
ggcgccctcccgaaagggg

SEQ ID NO: 9889 - DNA, 18 bp, Homo sapiens
cctcccaaagtgctgggg

SEQ ID NO: 9890 - DNA, 21 bp, Homo sapiens
ggccttctcagcagctggggc

SEQ ID NO: 9891 - DNA, 21 bp, Homo sapiens
cggctcctcagggctggggcc

SEQ ID NO: 9892 - DNA, 20 bp, Homo sapiens
ggcccccttctggccaagct

SEQ ID NO: 9893 - DNA, 19 bp, Homo sapiens
ggtccccactcccggggcc

SEQ ID NO: 9894 - DNA, 18 bp, Homo sapiens
ggcctcgcgggctggggc

SEQ ID NO: 9895 - DNA, 20 bp, Homo sapiens
ggccttccccaagctgggcc

SEQ ID NO: 9896 - DNA, 20 bp, Homo sapiens
cgcccccctcctccggggcc

SEQ ID NO: 9897 - DNA, 18 bp, Homo sapiens
cggcccgcctcccggggc

SEQ ID NO: 9898 - DNA, 16 bp, Homo sapiens
cggcccccttgtgggg

SEQ ID NO: 9899 - DNA, 19 bp, Homo sapiens
cggcgcggtgagctggggc

SEQ ID NO: 9900 - DNA, 20 bp, Homo sapiens
cagcctcagaaggctggggc

SEQ ID NO: 9901 - DNA, 20 bp, Homo sapiens
cggccggagggagctggggc

SEQ ID NO: 9902 - DNA, 17 bp, Homo sapiens
ggcggccgggctggggc

SEQ ID NO: 9903 - DNA, 16 bp, Homo sapiens
gaccctctctctgggg

SEQ ID NO: 9904 - DNA, 18 bp, Homo sapiens
cggcccccttcctgccgc

SEQ ID NO: 9905 - DNA, 20 bp, Homo sapiens
ggattcccacggctggggcc

SEQ ID NO: 9906 - DNA, 20 bp, Homo sapiens
ggcttccttctcccagggcc

SEQ ID NO: 9907 - DNA, 15 bp, Homo sapiens
ggcccccttctgggg

SEQ ID NO: 9908 - DNA, 22 bp, Homo sapiens
gcgtcccctgggtgctggggcc

SEQ ID NO: 9909 - DNA, 18 bp, Homo sapiens
cagctccagggctggggc

SEQ ID NO: 9910 - DNA, 15 bp, Homo sapiens
cgcccccctcccggg

SEQ ID NO: 9911 - DNA, 15 bp, Homo sapiens
ggccccagctggggc

SEQ ID NO: 9912 - DNA, 19 bp, Homo sapiens
ggcccctcctggctggggc

SEQ ID NO: 9913 - DNA, 19 bp, Homo sapiens
gcagacctgggctggggcc

SEQ ID NO: 9914 - DNA, 17 bp, Homo sapiens
ggctccctccccagggc

SEQ ID NO: 9915 - DNA, 18 bp, Homo sapiens
ggctgcctgggctggggc

SEQ ID NO: 9916 - DNA, 20 bp, Homo sapiens
cggcccacgacgctggggcc

SEQ ID NO: 9917 - DNA, 23 bp, Homo sapiens
cggcccccgtcgggtgttggggc

SEQ ID NO: 9918 - DNA, 19 bp, Homo sapiens
gggtctggggagctggggc

SEQ ID NO: 9919 - DNA, 20 bp, Homo sapiens
ggcccctccctgagatggcc

SEQ ID NO: 9920 - DNA, 19 bp, Homo sapiens
cgacttcctcctggagtgg

SEQ ID NO: 9921 - DNA, 20 bp, Homo sapiens
cggcgcccggagctggggcc

SEQ ID NO: 9922 - DNA, 18 bp, Homo sapiens
cggcctcccctcggcagc

SEQ ID NO: 9923 - DNA, 17 bp, Homo sapiens
cagccccctcccggggc

SEQ ID NO: 9924 - DNA, 20 bp, Homo sapiens
ggtccctcgcctctggggcc

SEQ ID NO: 9925 - DNA, 22 bp, Homo sapiens
ggtcccctccctgcagtatgcc

SEQ ID NO: 9926 - DNA, 16 bp, Homo sapiens
cgcgccccagctgggg

SEQ ID NO: 9927 - DNA, 18 bp, Homo sapiens
cggcacctctcccgaggc

SEQ ID NO: 9928 - DNA, 19 bp, Homo sapiens
gctccctcccgaggaggcc

SEQ ID NO: 9929 - DNA, 19 bp, Homo sapiens
ggccccccatcctggggcc

SEQ ID NO: 9930 - DNA, 21 bp, Homo sapiens
ggatccctcctgtctggggcc

SEQ ID NO: 9931 - DNA, 22 bp, Homo sapiens
ggcccccttcttgagcagggcc

SEQ ID NO: 9932 - DNA, 19 bp, Homo sapiens
gagtgtggggacagagtcc

SEQ ID NO: 9933 - DNA, 20 bp, Homo sapiens
cctctgagctgggaagaatc

SEQ ID NO: 9934 - DNA, 19 bp, Homo sapiens
cgggctggagcaggggtcc

SEQ ID NO: 9935 - DNA, 20 bp, Homo sapiens
ctcgcgggcagcccggatcc

SEQ ID NO: 9936 - DNA, 19 bp, Homo sapiens
cgggctcgggcccgggtcc

SEQ ID NO: 9937 - DNA, 19 bp, Homo sapiens
cctcccagaatcctggatc

SEQ ID NO: 9938 - DNA, 19 bp, Homo sapiens
cccacctggggcctggatc

SEQ ID NO: 9939 - DNA, 17 bp, Homo sapiens
tccctggctggggcgga

SEQ ID NO: 9940 - DNA, 20 bp, Homo sapiens
cctcttgagcccagtcggat

SEQ ID NO: 9941 - DNA, 24 bp, Homo sapiens
ctccttggttggggcccactggat

SEQ ID NO: 9942 - DNA, 19 bp, Homo sapiens
gaactagaaaacctgggtc

SEQ ID NO: 9943 - DNA, 17 bp, Homo sapiens
cctcccagctggggtcc

SEQ ID NO: 9944 - DNA, 19 bp, Homo sapiens
cccctgagctgggcatgtc

SEQ ID NO: 9945 - DNA, 23 bp, Homo sapiens
ccttccgaatgcgttccggatcc

SEQ ID NO: 9946 - DNA, 24 bp, Homo sapiens
tcctcgagctgggtgaaccgggtc

SEQ ID NO: 9947 - DNA, 23 bp, Homo sapiens
cctgcccgggagattccggatcc

SEQ ID NO: 9948 - DNA, 20 bp, Homo sapiens
cctccacgggttggggcgcc

SEQ ID NO: 9949 - DNA, 20 bp, Homo sapiens
cttccagctgggggccctcc

SEQ ID NO: 9950 - DNA, 19 bp, Homo sapiens
ctcccgagctcgcgggtcc

SEQ ID NO: 9951 - DNA, 22 bp, Homo sapiens
cctcccaggctgggactggttc

SEQ ID NO: 9952 - DNA, 20 bp, Homo sapiens
cctgtcgggctggggccaca

SEQ ID NO: 9953 - DNA, 65 bp, Melanoplus sanguinipes entomopoxvirus
gcccgtcttcaacctggtgctggactttgacctccccctgaaaaagcccggcctgagcctggagc

SEQ ID NO: 9954 - DNA, 24 bp, Melanoplus sanguinipes entomopoxvirus
cccctgaaaaagcccggcctgagc

SEQ ID NO: 9955 - DNA, 24 bp, Melanoplus sanguinipes entomopoxvirus
tcttcaacctggtgctggactttg

SEQ ID NO: 9956 - DNA, 19 bp, Homo sapiens
cccttagaggaggcctaag

SEQ ID NO: 9957 - DNA, 18 bp, Homo sapiens
ccccggagggagcccggc

SEQ ID NO: 9958 - DNA, 16 bp, Homo sapiens
cctggaaaagcctgag

SEQ ID NO: 9959 - DNA, 20 bp, Homo sapiens
ccctgaaagaggtacctgag

SEQ ID NO: 9960 - DNA, 20 bp, Homo sapiens
cccagagaggctgcctgagc

SEQ ID NO: 9961 - DNA, 18 bp, Homo sapiens
ctttagaaagcccaggag

SEQ ID NO: 9962 - DNA, 19 bp, Homo sapiens
ctgaagaagcccagttctg

SEQ ID NO: 9963 - DNA, 23 bp, Homo sapiens
cccctgaagagggctttagggag

SEQ ID NO: 9964 - DNA, 19 bp, Homo sapiens
cctcttaaaaaggcctgag

SEQ ID NO: 9965 - DNA, 19 bp, Homo sapiens
ccctgaaaaagttacatag

SEQ ID NO: 9966 - DNA, 17 bp, Homo sapiens
ccctgaggccggcctgg

SEQ ID NO: 9967 - DNA, 18 bp, Homo sapiens
cccgggggagggcctgag

SEQ ID NO: 9968 - DNA, 22 bp, Homo sapiens
cccctggagaatcccactgggc

SEQ ID NO: 9969 - DNA, 20 bp, Homo sapiens
ctggaaagcccggcctgagc

SEQ ID NO: 9970 - DNA, 20 bp, Homo sapiens
cctcggaaaacagacctgag

SEQ ID NO: 9971 - DNA, 21 bp, Homo sapiens
cctccgggaaagcccaggggc

SEQ ID NO: 9972 - DNA, 15 bp, Homo sapiens
ccctgaaaagggcct

SEQ ID NO: 9973 - DNA, 25 bp, Homo sapiens
ccccagcctcggagcctggcctgag

SEQ ID NO: 9974 - DNA, 21 bp, Homo sapiens
ccctgaaagggctgctccagc

SEQ ID NO: 9975 - DNA, 21 bp, Homo sapiens
ccccgaaaagaatttctgggc

SEQ ID NO: 9976 - DNA, 20 bp, Homo sapiens
ccactgaaagggcctatggc

SEQ ID NO: 9977 - DNA, 18 bp, Homo sapiens
tgaggaagcccaactagc

SEQ ID NO: 9978 - DNA, 19 bp, Homo sapiens
cctaaaaagcctggaaaag

SEQ ID NO: 9979 - DNA, 17 bp, Homo sapiens
cccctgaaggagtcagc

SEQ ID NO: 9980 - DNA, 15 bp, Homo sapiens
ccctgaagaacctga

SEQ ID NO: 9981 - DNA, 15 bp, Homo sapiens
cccagcccggcctga

SEQ ID NO: 9982 - DNA, 18 bp, Homo sapiens
cccctgagagaacctgag

SEQ ID NO: 9983 - DNA, 15 bp, Homo sapiens
cccggcccggcttga

SEQ ID NO: 9984 - DNA, 16 bp, Homo sapiens
ccgaggaagcccagag

SEQ ID NO: 9985 - DNA, 18 bp, Homo sapiens
cccctcaaagggcccgag

SEQ ID NO: 9986 - DNA, 17 bp, Homo sapiens
ctgggaagcccagggag

SEQ ID NO: 9987 - DNA, 20 bp, Homo sapiens
ccttagaaaaagcccttgag

SEQ ID NO: 9988 - DNA, 22 bp, Homo sapiens
cctggaagacctgaaccctgag

SEQ ID NO: 9989 - DNA, 19 bp, Homo sapiens
cctgaaaaacgtccgggag

SEQ ID NO: 9990 - DNA, 18 bp, Homo sapiens
ccctcgggaaagcccgcc

SEQ ID NO: 9991 - DNA, 20 bp, Homo sapiens
cctccgggaaagcccaaggc

SEQ ID NO: 9992 - DNA, 19 bp, Homo sapiens
ctgaagaaaaagacctgag

SEQ ID NO: 9993 - DNA, 15 bp, Homo sapiens
acctggtagattttg

SEQ ID NO: 9994 - DNA, 19 bp, Homo sapiens
tcttcaacttgggtgttga

SEQ ID NO: 9995 - DNA, 18 bp, Homo sapiens
ccttgcctgctggacttt

SEQ ID NO: 9996 - DNA, 68 bp, Melanoplus sanguinipes entomopoxvirus
cccggccccctcccgagctggggcccggatccccgacctccccggccccctcccgagctggggcccgg

SEQ ID NO: 9997 - DNA, 17 bp, Melanoplus sanguinipes entomopoxvirus
cccgagctggggcccgg

SEQ ID NO: 9998 - DNA, 24 bp, Melanoplus sanguinipes entomopoxvirus
gccccctcccgagctggggcccgg

SEQ ID NO: 9999 - DNA, 20 bp, Homo sapiens
ccccagccctgagggcccgg

SEQ ID NO: 10000 - DNA, 19 bp, Homo sapiens
cccgggcggccctgcccgg

SEQ ID NO: 10001 - DNA, 18 bp, Homo sapiens
cccaagacggtggcttgg

SEQ ID NO: 10002 - DNA, 19 bp, Homo sapiens
cccggcccgcggggcctgg

SEQ ID NO: 10003 - DNA, 19 bp, Homo sapiens
cctggagctgccagctcgg

SEQ ID NO: 10004 - DNA, 18 bp, Homo sapiens
cccaagcccagaccccgg

SEQ ID NO: 10005 - DNA, 19 bp, Homo sapiens
ccgagccgccagtccctgg

SEQ ID NO: 10006 - DNA, 19 bp, Homo sapiens
cccagctagagctgcctgg

SEQ ID NO: 10007 - DNA, 18 bp, Homo sapiens
ccggagcaggcagctcgg

SEQ ID NO: 10008 - DNA, 19 bp, Homo sapiens
cccgagccgttcagcctgg

SEQ ID NO: 10009 - DNA, 19 bp, Homo sapiens
ccggggccgctgggcctgg

SEQ ID NO: 10010 - DNA, 18 bp, Homo sapiens
cctggaagtagggctcgg

SEQ ID NO: 10011 - DNA, 18 bp, Homo sapiens
cccagggggcacacctgg

SEQ ID NO: 10012 - DNA, 19 bp, Homo sapiens
ccagaggccctgggcccgg

SEQ ID NO: 10013 - DNA, 18 bp, Homo sapiens
ccctagtctcagcctcgg

SEQ ID NO: 10014 - DNA, 19 bp, Homo sapiens
ccgcgcgctcagggcccgg

SEQ ID NO: 10015 - DNA, 18 bp, Homo sapiens
cctgaactggccccctgg

SEQ ID NO: 10016 - DNA, 20 bp, Homo sapiens
cctcggcacctggggtccgg

SEQ ID NO: 10017 - DNA, 18 bp, Homo sapiens
ccggggcctagcgcccgg

SEQ ID NO: 10018 - DNA, 20 bp, Homo sapiens
ccccagctggtgagccctgg

SEQ ID NO: 10019 - DNA, 19 bp, Homo sapiens
cccaagctgcagcgcccgg

SEQ ID NO: 10020 - DNA, 18 bp, Homo sapiens
ccggagctggtgccccgg

SEQ ID NO: 10021 - DNA, 19 bp, Homo sapiens
cccagctaaaagtgtccgg

SEQ ID NO: 10022 - DNA, 21 bp, Homo sapiens
cccggagctggaccttctcgg

SEQ ID NO: 10023 - DNA, 19 bp, Homo sapiens
ccgagccgcagaatcctgg

SEQ ID NO: 10024 - DNA, 19 bp, Homo sapiens
cccagttccctaggcccgg

SEQ ID NO: 10025 - DNA, 18 bp, Homo sapiens
cccaggcccggggcccgg

SEQ ID NO: 10026 - DNA, 19 bp, Homo sapiens
cccaaaggacagggttcgg

SEQ ID NO: 10027 - DNA, 19 bp, Homo sapiens
ccggagctagacagcctgg

SEQ ID NO: 10028 - DNA, 18 bp, Homo sapiens
cccgaaccaccagcccgg

SEQ ID NO: 10029 - DNA, 19 bp, Homo sapiens
ccgaggccccgaggcctgg

SEQ ID NO: 10030 - DNA, 18 bp, Homo sapiens
cctagctggaaaccctgg

SEQ ID NO: 10031 - DNA, 18 bp, Homo sapiens
cccgaactggggccgcgg

SEQ ID NO: 10032 - DNA, 18 bp, Homo sapiens
cccgagcccagagcctgg

SEQ ID NO: 10033 - DNA, 18 bp, Homo sapiens
cctgagctgggggatcgg

SEQ ID NO: 10034 - DNA, 22 bp, Homo sapiens
ccgggctggggctgggtccggc

SEQ ID NO: 10035 - DNA, 19 bp, Homo sapiens
cccggcggtgggggcccgg

SEQ ID NO: 10036 - DNA, 19 bp, Homo sapiens
cccaagctgggtggcctgg

SEQ ID NO: 10037 - DNA, 19 bp, Homo sapiens
cccagagccacgggtctgg

SEQ ID NO: 10038 - DNA, 18 bp, Homo sapiens
ccagagcaggatgcccgg

SEQ ID NO: 10039 - DNA, 19 bp, Homo sapiens
cccgagcctcccagcctgg

SEQ ID NO: 10040 - DNA, 18 bp, Homo sapiens
cccagggccgacgcccgg

SEQ ID NO: 10041 - DNA, 18 bp, Homo sapiens
cccgaaggctaagcccgg

SEQ ID NO: 10042 - DNA, 18 bp, Homo sapiens
ccagggcccaagcctcgg

SEQ ID NO: 10043 - DNA, 20 bp, Homo sapiens
ccggagctgcgagctctcgg

SEQ ID NO: 10044 - DNA, 18 bp, Homo sapiens
ccccagctaggaatccgg

SEQ ID NO: 10045 - DNA, 18 bp, Homo sapiens
ccggggcgcggggctcgg

SEQ ID NO: 10046 - DNA, 20 bp, Homo sapiens
cccgacggggagcggcccgg

SEQ ID NO: 10047 - DNA, 19 bp, Homo sapiens
cccaagctctgcggcccgg

SEQ ID NO: 10048 - DNA, 18 bp, Homo sapiens
cccggagctgcgactcgg

SEQ ID NO: 10049 - DNA, 18 bp, Homo sapiens
cccaagccgggggcctgg

SEQ ID NO: 10050 - DNA, 21 bp, Homo sapiens
cccgagctccgcagggctcgg

SEQ ID NO: 10051 - DNA, 18 bp, Homo sapiens
ccctgagcttcagcctgg

SEQ ID NO: 10052 - DNA, 19 bp, Homo sapiens
ccctggaacctgggtccgg

SEQ ID NO: 10053 - DNA, 18 bp, Homo sapiens
cccgagctgctggcctgg

SEQ ID NO: 10054 - DNA, 19 bp, Homo sapiens
cccgagagcccaggcctgg

SEQ ID NO: 10055 - DNA, 18 bp, Homo sapiens
cccgggctggacgcacgg

SEQ ID NO: 10056 - DNA, 19 bp, Homo sapiens
cccaggctcttaggtccgg

SEQ ID NO: 10057 - DNA, 19 bp, Homo sapiens
ccacgggcacacggcccgg

SEQ ID NO: 10058 - DNA, 18 bp, Homo sapiens
cccgcgctgagaccctgg

SEQ ID NO: 10059 - DNA, 19 bp, Homo sapiens
cccgaagcccagcccctgg

SEQ ID NO: 10060 - DNA, 18 bp, Homo sapiens
ccagaggcccgagtccgg

SEQ ID NO: 10061 - DNA, 18 bp, Homo sapiens
cccgggaccccggcccgg

SEQ ID NO: 10062 - DNA, 20 bp, Homo sapiens
cccggggcgcgcgtgcccgg

SEQ ID NO: 10063 - DNA, 19 bp, Homo sapiens
cgagtttataagtgcccgg

SEQ ID NO: 10064 - DNA, 18 bp, Homo sapiens
cccggagccgctccccgg

SEQ ID NO: 10065 - DNA, 19 bp, Homo sapiens
ccagggccacggggcctgg

SEQ ID NO: 10066 - DNA, 19 bp, Homo sapiens
ccagagccggcaggcctgg

SEQ ID NO: 10067 - DNA, 18 bp, Homo sapiens
cccagctaagttgtccgg

SEQ ID NO: 10068 - DNA, 18 bp, Homo sapiens
ccggggctgcgagcccgg

SEQ ID NO: 10069 - DNA, 20 bp, Homo sapiens
ccggggctggccgcgcccgg

SEQ ID NO: 10070 - DNA, 20 bp, Homo sapiens
gccacctcccgggctggcgc

SEQ ID NO: 10071 - DNA, 15 bp, Homo sapiens
cctcctcgggcccgg

SEQ ID NO: 10072 - DNA, 20 bp, Homo sapiens
gccccttccttagtctctgg

SEQ ID NO: 10073 - DNA, 18 bp, Homo sapiens
gcccttccctgagacccg

SEQ ID NO: 10074 - DNA, 19 bp, Homo sapiens
gccccctcccggcagccgg

SEQ ID NO: 10075 - DNA, 20 bp, Homo sapiens
gcttcctgtgccaggcccgg

SEQ ID NO: 10076 - DNA, 17 bp, Homo sapiens
gcccttcctggagcccg

SEQ ID NO: 10077 - DNA, 19 bp, Homo sapiens
cctggaggctggggcctgg

SEQ ID NO: 10078 - DNA, 18 bp, Homo sapiens
gcttcctccgagccgccg

SEQ ID NO: 10079 - DNA, 21 bp, Homo sapiens
ccccctcccaggagggcctgg

SEQ ID NO: 10080 - DNA, 22 bp, Homo sapiens
gcctcatcctcaacgggcccgg

SEQ ID NO: 10081 - DNA, 21 bp, Homo sapiens
gcctcctcctctcgggcccgg

SEQ ID NO: 10082 - DNA, 21 bp, Homo sapiens
gccttccctgggggtgcctgg

SEQ ID NO: 10083 - DNA, 17 bp, Homo sapiens
ctccagctggggcctgg

SEQ ID NO: 10084 - DNA, 25 bp, Homo sapiens
gcccctccccgggccgggggctcgg

SEQ ID NO: 10085 - DNA, 20 bp, Homo sapiens
gccccctggctggggcctgg

SEQ ID NO: 10086 - DNA, 20 bp, Homo sapiens
cctcatttctgggaccctgg

SEQ ID NO: 10087 - DNA, 18 bp, Homo sapiens
gcccctgcccggggcccg

SEQ ID NO: 10088 - DNA, 19 bp, Homo sapiens
gccctctcgccgggcccgg

SEQ ID NO: 10089 - DNA, 21 bp, Homo sapiens
gcccccgccgcaggggcccgg

SEQ ID NO: 10090 - DNA, 18 bp, Homo sapiens
cctctgtccggaagcccg

SEQ ID NO: 10091 - DNA, 19 bp, Homo sapiens
gcttcctcccaagctggag

SEQ ID NO: 10092 - DNA, 16 bp, Homo sapiens
acctcctcccgggccc

SEQ ID NO: 10093 - DNA, 20 bp, Homo sapiens
cccctccctgagggccctgg

SEQ ID NO: 10094 - DNA, 18 bp, Homo sapiens
gccccctcccgggccccg

SEQ ID NO: 10095 - DNA, 22 bp, Homo sapiens
gcctcttcccgagcggcagcgg

SEQ ID NO: 10096 - DNA, 18 bp, Homo sapiens
gccccctctgcggcttgg

SEQ ID NO: 10097 - DNA, 22 bp, Homo sapiens
ccttcctgagctgggggatcgg

SEQ ID NO: 10098 - DNA, 21 bp, Homo sapiens
cccgcccgagatcgggcccgg

SEQ ID NO: 10099 - DNA, 17 bp, Homo sapiens
gctttctcctggagccg

SEQ ID NO: 10100 - DNA, 18 bp, Homo sapiens
gcccctccccgggctcgg

SEQ ID NO: 10101 - DNA, 26 bp, Homo sapiens
gctctctcccagagccacgggtctgg

SEQ ID NO: 10102 - DNA, 19 bp, Homo sapiens
ccccactcccggggcctgg

SEQ ID NO: 10103 - DNA, 20 bp, Homo sapiens
cctcgcgggctggggcttgg

SEQ ID NO: 10104 - DNA, 21 bp, Homo sapiens
gcccttccctgccaggcccgg

SEQ ID NO: 10105 - DNA, 18 bp, Homo sapiens
gccccctctgctggcccg

SEQ ID NO: 10106 - DNA, 21 bp, Homo sapiens
gccccctcccagccattttgg

SEQ ID NO: 10107 - DNA, 19 bp, Homo sapiens
gcccccacccgagccttgg

SEQ ID NO: 10108 - DNA, 18 bp, Homo sapiens
accccctcccgagcgccg

SEQ ID NO: 10109 - DNA, 18 bp, Homo sapiens
ccccctcccgggccgccg

SEQ ID NO: 10110 - DNA, 25 bp, Homo sapiens
gccccctcccgcgcccctcccccgg

SEQ ID NO: 10111 - DNA, 20 bp, Homo sapiens
gctccctccccagggcctgg

SEQ ID NO: 10112 - DNA, 19 bp, Homo sapiens
gctcctgcccgcggctcgg

SEQ ID NO: 10113 - DNA, 24 bp, Homo sapiens
gctccttccagagcccagacccgg

SEQ ID NO: 10114 - DNA, 20 bp, Homo sapiens
gcctctcccgagcgcgctgg

SEQ ID NO: 10115 - DNA, 21 bp, Homo sapiens
gctccctcctgaagccagccc

SEQ ID NO: 10116 - DNA, 19 bp, Homo sapiens
cccctcccgggccagctgg

SEQ ID NO: 10117 - DNA, 19 bp, Homo sapiens
gccccctctcaggctgaga

SEQ ID NO: 10118 - DNA, 21 bp, Homo sapiens
gccccctcccggggctcctgg

SEQ ID NO: 10119 - DNA, 18 bp, Homo sapiens
ccctcccgcctggcctgg

SEQ ID NO: 10120 - DNA, 18 bp, Homo sapiens
gctctcccgagctcgcgg

SEQ ID NO: 10121 - DNA, 19 bp, Homo sapiens
gccccctcccactagcccg

SEQ ID NO: 10122 - DNA, 18 bp, Homo sapiens
gccccctccccgcgcccg

SEQ ID NO: 10123 - DNA, 94 bp, Melanoplus sanguinipes entomopoxvirus
cgaccttcccggccccctcccgagctggggcccggatccccccggttcccccgaccttcccggccccctcccgagctggggcccggatcccccg

SEQ ID NO: 10124 - DNA, 24 bp, Melanoplus sanguinipes entomopoxvirus
tggggcccggatccccccggttcc

SEQ ID NO: 10125 - DNA, 24 bp, Melanoplus sanguinipes entomopoxvirus
cccgagctggggcccggatccccc

SEQ ID NO: 10126 - DNA, 19 bp, Homo sapiens
ggcgtccgggtccccggcc

SEQ ID NO: 10127 - DNA, 21 bp, Homo sapiens
ggggcctgtggctctggttcc

SEQ ID NO: 10128 - DNA, 18 bp, Homo sapiens
tgggacctgggtctggct

SEQ ID NO: 10129 - DNA, 24 bp, Homo sapiens
tggggtccagatccttgatcattc

SEQ ID NO: 10130 - DNA, 20 bp, Homo sapiens
tggggcccggcttccctggt

SEQ ID NO: 10131 - DNA, 19 bp, Homo sapiens
tggggtctggacccccagc

SEQ ID NO: 10132 - DNA, 19 bp, Homo sapiens
tagggcccggatttcccgg

SEQ ID NO: 10133 - DNA, 22 bp, Homo sapiens
ggtacggggtccctccggttcc

SEQ ID NO: 10134 - DNA, 20 bp, Homo sapiens
tggggtccgggtcccccggt

SEQ ID NO: 10135 - DNA, 18 bp, Homo sapiens
ggcccgatccccttggtt

SEQ ID NO: 10136 - DNA, 20 bp, Homo sapiens
cctgagtggggcccttcccc

SEQ ID NO: 10137 - DNA, 18 bp, Homo sapiens
gagctggggtctgtcccc

SEQ ID NO: 10138 - DNA, 24 bp, Homo sapiens
ccccagctggggctcagctatccc

SEQ ID NO: 10139 - DNA, 20 bp, Homo sapiens
ctgggtccacggcggatccc

SEQ ID NO: 10140 - DNA, 23 bp, Homo sapiens
cctgagctgggagacaaggtccc

SEQ ID NO: 10141 - DNA, 18 bp, Homo sapiens
gctggggcccccggcccc

SEQ ID NO: 10142 - DNA, 18 bp, Homo sapiens
ccaaagcccggatcctcc

SEQ ID NO: 10143 - DNA, 21 bp, Homo sapiens
ccagctggggctgatgtcccc

SEQ ID NO: 10144 - DNA, 25 bp, Homo sapiens
ccgagctgaggccccgatgacctcc

SEQ ID NO: 10145 - DNA, 19 bp, Homo sapiens
cctaggctggggcttgaac

SEQ ID NO: 10146 - DNA, 20 bp, Homo sapiens
ccgagctggggcacctgctc

SEQ ID NO: 10147 - DNA, 20 bp, Homo sapiens
gctggggcctgcaggccccc

SEQ ID NO: 10148 - DNA, 21 bp, Homo sapiens
cgggctgtggctggctgcccc

SEQ ID NO: 10149 - DNA, 19 bp, Homo sapiens
cggctggggccccaccccc

SEQ ID NO: 10150 - DNA, 20 bp, Homo sapiens
cccgagcgggggcctgagcc

SEQ ID NO: 10151 - DNA, 20 bp, Homo sapiens
ccctggctggggcctgggac

SEQ ID NO: 10152 - DNA, 26 bp, Homo sapiens
gagctggggctgtctttgggggatcc

SEQ ID NO: 10153 - DNA, 20 bp, Homo sapiens
ccagagctgggctatcctcc

SEQ ID NO: 10154 - DNA, 18 bp, Homo sapiens
gagctggggcctgttccc

SEQ ID NO: 10155 - DNA, 22 bp, Homo sapiens
cccgagctcggggcctgcctcc

SEQ ID NO: 10156 - DNA, 18 bp, Homo sapiens
ccgggccggggcttctcc

SEQ ID NO: 10157 - DNA, 21 bp, Homo sapiens
cctgggctgaggcctgggccc

SEQ ID NO: 10158 - DNA, 15 bp, Homo sapiens
agctgggacagtccc

SEQ ID NO: 10159 - DNA, 18 bp, Homo sapiens
cgggctggagcgggggtc

SEQ ID NO: 10160 - DNA, 17 bp, Homo sapiens
gcaaggcccggatcccc

SEQ ID NO: 10161 - DNA, 19 bp, Homo sapiens
cctggctggggccagcccc

SEQ ID NO: 10162 - DNA, 17 bp, Homo sapiens
gagtttgggccgaatcc

SEQ ID NO: 10163 - DNA, 20 bp, Homo sapiens
cgggctagggctcgggctcc

SEQ ID NO: 10164 - DNA, 27 bp, Homo sapiens
ccgggctggggcgcttctgggggatcc

SEQ ID NO: 10165 - DNA, 19 bp, Homo sapiens
ccctgagtctggatttccc

SEQ ID NO: 10166 - DNA, 17 bp, Homo sapiens
cggctggggctcggctc

SEQ ID NO: 10167 - DNA, 20 bp, Homo sapiens
cctggactggggcttatccc

SEQ ID NO: 10168 - DNA, 18 bp, Homo sapiens
cctgggctgtgcatcccc

SEQ ID NO: 10169 - DNA, 22 bp, Homo sapiens
ccttggttggggcccactggat

SEQ ID NO: 10170 - DNA, 20 bp, Homo sapiens
cccagctggggtccaaaccc

SEQ ID NO: 10171 - DNA, 20 bp, Homo sapiens
ccagctggggctgcagcccc

SEQ ID NO: 10172 - DNA, 18 bp, Homo sapiens
ctagggcccggatttccc

SEQ ID NO: 10173 - DNA, 20 bp, Homo sapiens
ccctagctcgctccggatcc

SEQ ID NO: 10174 - DNA, 20 bp, Homo sapiens
ccccagctggggtccgtccc

SEQ ID NO: 10175 - DNA, 23 bp, Homo sapiens
cccagagcctctccgggttctcc

SEQ ID NO: 10176 - DNA, 18 bp, Homo sapiens
cccgtggctgggcagttc

SEQ ID NO: 10177 - DNA, 23 bp, Homo sapiens
ccagggctggggcccgaagaccc

SEQ ID NO: 10178 - DNA, 24 bp, Homo sapiens
ccccagctggggcctcatcagccc

SEQ ID NO: 10179 - DNA, 20 bp, Homo sapiens
cctgagctgggtcccagctc

SEQ ID NO: 10180 - DNA, 23 bp, Homo sapiens
cccggttggggctcagctgtccc

SEQ ID NO: 10181 - DNA, 17 bp, Homo sapiens
ccggggctggggctgat

SEQ ID NO: 10182 - DNA, 19 bp, Homo sapiens
ccgagtcggtcagatcccc

SEQ ID NO: 10183 - DNA, 16 bp, Homo sapiens
cgagctggtgacttcc

SEQ ID NO: 10184 - DNA, 18 bp, Homo sapiens
cccaggctggggcagctc

SEQ ID NO: 10185 - DNA, 20 bp, Homo sapiens
cccgagctcgcgggtcctcc

SEQ ID NO: 10186 - DNA, 124 bp, Melanoplus sanguinipes entomopoxvirus
cgagctggggcccggatcccccgacctccccggccccctcccgagctggggcccggttcccccgacctccccggccccctcccgagctggggcccggttcccccaccttcccggccctcgcccg

SEQ ID NO: 10187 - DNA, 24 bp, Melanoplus sanguinipes entomopoxvirus
tccccggccccctcccgagctggg

SEQ ID NO: 10188 - DNA, 24 bp, Melanoplus sanguinipes entomopoxvirus
cccgagctggggcccggttccccc

SEQ ID NO: 10189 - DNA, 21 bp, Homo sapiens
ccctggccctgagcggctggg

SEQ ID NO: 10190 - DNA, 24 bp, Homo sapiens
tcctcggcctcccaaaatattggg

SEQ ID NO: 10191 - DNA, 18 bp, Homo sapiens
tccccgccccctcctgcc

SEQ ID NO: 10192 - DNA, 17 bp, Homo sapiens
cggccccctacctctgg

SEQ ID NO: 10193 - DNA, 21 bp, Homo sapiens
tcccccgcgggccgagctggg

SEQ ID NO: 10194 - DNA, 25 bp, Homo sapiens
tccccggctctggcagcgggctggg

SEQ ID NO: 10195 - DNA, 24 bp, Homo sapiens
tccttggcctcccaaagtgttggg

SEQ ID NO: 10196 - DNA, 23 bp, Homo sapiens
tcctcggccccctgctctgccgg

SEQ ID NO: 10197 - DNA, 23 bp, Homo sapiens
cccttggtcccctcccacccagg

SEQ ID NO: 10198 - DNA, 19 bp, Homo sapiens
cccttggccccttcctgcc

SEQ ID NO: 10199 - DNA, 19 bp, Homo sapiens
cccgccccctccgcccggg

SEQ ID NO: 10200 - DNA, 21 bp, Homo sapiens
ccccggcctcctcctctcggg

SEQ ID NO: 10201 - DNA, 23 bp, Homo sapiens
ccccggcctcccaaaatgctggg

SEQ ID NO: 10202 - DNA, 21 bp, Homo sapiens
tccccggctccctcccgcccg

SEQ ID NO: 10203 - DNA, 23 bp, Homo sapiens
tccctcgcggaggctgagctggg

SEQ ID NO: 10204 - DNA, 27 bp, Homo sapiens
tcccctgccccctcccttccccctggg

SEQ ID NO: 10205 - DNA, 20 bp, Homo sapiens
ccccgggaatccgagctggg

SEQ ID NO: 10206 - DNA, 23 bp, Homo sapiens
cctcggcctcccaaagagctggg

SEQ ID NO: 10207 - DNA, 19 bp, Homo sapiens
tccccggcttctcccgccg

SEQ ID NO: 10208 - DNA, 21 bp, Homo sapiens
tcctggctttactgagctggg

SEQ ID NO: 10209 - DNA, 17 bp, Homo sapiens
ccaggcccccttcctgg

SEQ ID NO: 10210 - DNA, 24 bp, Homo sapiens
tccttggcctcccaaagtgctggg

SEQ ID NO: 10211 - DNA, 23 bp, Homo sapiens
cctcggcctcccaaaatgctggg

SEQ ID NO: 10212 - DNA, 17 bp, Homo sapiens
cagctccctcccatggg

SEQ ID NO: 10213 - DNA, 21 bp, Homo sapiens
ggctttccttcctgagctggg

SEQ ID NO: 10214 - DNA, 24 bp, Homo sapiens
tccttggactcccaaagtgctggg

SEQ ID NO: 10215 - DNA, 22 bp, Homo sapiens
tctccagtctcaaggagctggg

SEQ ID NO: 10216 - DNA, 23 bp, Homo sapiens
cctcggcctcccaaagggctggg

SEQ ID NO: 10217 - DNA, 20 bp, Homo sapiens
ccgcctcccaaagtgctggg

SEQ ID NO: 10218 - DNA, 23 bp, Homo sapiens
ccttggcctcccaaaatgttggg

SEQ ID NO: 10219 - DNA, 20 bp, Homo sapiens
gccttggcttccaagctggg

SEQ ID NO: 10220 - DNA, 15 bp, Homo sapiens
tccccgccccctccg

SEQ ID NO: 10221 - DNA, 20 bp, Homo sapiens
tccccggctccctccgatgg

SEQ ID NO: 10222 - DNA, 21 bp, Homo sapiens
ccccggctcagctgagctggg

SEQ ID NO: 10223 - DNA, 19 bp, Homo sapiens
tcctcggccccctccttgg

SEQ ID NO: 10224 - DNA, 22 bp, Homo sapiens
ccctgcccctcagcaagctggg

SEQ ID NO: 10225 - DNA, 18 bp, Homo sapiens
tccatggcccccttctgg

SEQ ID NO: 10226 - DNA, 23 bp, Homo sapiens
cctcggcctcccaaactgctggg

SEQ ID NO: 10227 - DNA, 21 bp, Homo sapiens
tccttggccctaggagctggg

SEQ ID NO: 10228 - DNA, 23 bp, Homo sapiens
ccttggcctcccaaagagctggg

SEQ ID NO: 10229 - DNA, 20 bp, Homo sapiens
ccgggtctctgcgagctggg

SEQ ID NO: 10230 - DNA, 19 bp, Homo sapiens
cctggcggctcgagctggg

SEQ ID NO: 10231 - DNA, 22 bp, Homo sapiens
ccggggttggggtggaggcccc

SEQ ID NO: 10232 - DNA, 16 bp, Homo sapiens
gctggggcagctggcc

SEQ ID NO: 10233 - DNA, 15 bp, Homo sapiens
cccggctgggattcc

SEQ ID NO: 10234 - DNA, 20 bp, Homo sapiens
cccgagtggggctggctccc

SEQ ID NO: 10235 - DNA, 19 bp, Homo sapiens
cctaggctggggttgcccc

SEQ ID NO: 10236 - DNA, 24 bp, Homo sapiens
cccggctctgcagcctggttcccc

SEQ ID NO: 10237 - DNA, 21 bp, Homo sapiens
cggcttcttcgcggttccccc

SEQ ID NO: 10238 - DNA, 18 bp, Homo sapiens
cctcagctgggttttccc

SEQ ID NO: 10239 - DNA, 17 bp, Homo sapiens
cccgggctggcgcgtcc

SEQ ID NO: 10240 - DNA, 19 bp, Homo sapiens
ccgggccggggcttctccc

SEQ ID NO: 10241 - DNA, 23 bp, Homo sapiens
cccggctggggtctctaagctcc

SEQ ID NO: 10242 - DNA, 20 bp, Homo sapiens
ccaaggacgcctggttcccc

SEQ ID NO: 10243 - DNA, 22 bp, Homo sapiens
ccccagctgctggggttccccc

SEQ ID NO: 10244 - DNA, 24 bp, Homo sapiens
cccgggctggcggccactgcgtcc

SEQ ID NO: 10245 - DNA, 20 bp, Homo sapiens
ccccagttggggggtccccc

SEQ ID NO: 10246 - DNA, 18 bp, Homo sapiens
cccggcggcccggtttcc

SEQ ID NO: 10247 - DNA, 17 bp, Homo sapiens
ccgggctggggcgcttc

SEQ ID NO: 10248 - DNA, 21 bp, Homo sapiens
cctgggctggagcgttcttcc

SEQ ID NO: 10249 - DNA, 17 bp, Homo sapiens
ccgagctgggcttggct

SEQ ID NO: 10250 - DNA, 22 bp, Homo sapiens
cctgggctgggggcaccgtccc

SEQ ID NO: 10251 - DNA, 19 bp, Homo sapiens
cccgggcggggccggctcc

SEQ ID NO: 10252 - DNA, 17 bp, Homo sapiens
gagctgaggctgtttcc

SEQ ID NO: 10253 - DNA, 22 bp, Homo sapiens
cccgtggctgggcagttcttcc

SEQ ID NO: 10254 - DNA, 18 bp, Homo sapiens
gagcacgcctcccggttc

SEQ ID NO: 10255 - DNA, 22 bp, Homo sapiens
ccagagctggggtcggggcccc

SEQ ID NO: 10256 - DNA, 18 bp, Homo sapiens
cctggctgggggctcccc

SEQ ID NO: 10257 - DNA, 18 bp, Homo sapiens
cctgggctggggcccagc

SEQ ID NO: 10258 - DNA, 20 bp, Homo sapiens
cctgggctggggctgtggct

SEQ ID NO: 10259 - DNA, 18 bp, Homo sapiens
ccggggctggggctgatt

SEQ ID NO: 10260 - DNA, 19 bp, Homo sapiens
ccatgagaccctggtttcc

SEQ ID NO: 10261 - DNA, 22 bp, Homo sapiens
ccccagcccttctcctggttcc

SEQ ID NO: 10262 - DNA, 19 bp, Homo sapiens
cgagctggtgacttcctcc

SEQ ID NO: 10263 - DNA, 15 bp, Homo sapiens
cgagctgggtcctcc

SEQ ID NO: 10264 - DNA, 19 bp, Homo sapiens
cctgagctgggcgcctgct

SEQ ID NO: 10265 - DNA, 61 bp, Melanoplus sanguinipes entomopoxvirus
tcaaaggtcaagccggtagcggcgttccctacgctgctttctcaggccggaagaccaatga

SEQ ID NO: 10266 - DNA, 24 bp, Melanoplus sanguinipes entomopoxvirus
aaggtcaagccggtagcggcgttc

SEQ ID NO: 10267 - DNA, 24 bp, Melanoplus sanguinipes entomopoxvirus
tttctcaggccggaagaccaatga

SEQ ID NO: 10268 - DNA, 24 bp, Homo sapiens
aggtcaaacactgcggcggcgttc

SEQ ID NO: 10269 - DNA, 18 bp, Homo sapiens
ttcctcaggttctcaatg

SEQ ID NO: 10270 - DNA, 16 bp, Homo sapiens
ctcaggccagccagtg

SEQ ID NO: 10271 - DNA, 25 bp, Homo sapiens
tttcccaggctggagataagaatga

SEQ ID NO: 10272 - DNA, 16 bp, Homo sapiens
tctctcggagaccaat

SEQ ID NO: 10273 - DNA, 19 bp, Homo sapiens
tttcacaggtaaaccaatg

SEQ ID NO: 10274 - DNA, 21 bp, Homo sapiens
tttcccaggccggacagcatg

SEQ ID NO: 10275 - DNA, 22 bp, Homo sapiens
tttcccaggctggagtgcaatg

SEQ ID NO: 10276 - DNA, 61 bp, Melanoplus sanguinipes entomopoxvirus
tgtggccaggatgctcttccgagaccaaaatgaagaggagctcctccaacacatggccata

SEQ ID NO: 10277 - DNA, 24 bp, Melanoplus sanguinipes entomopoxvirus
ggagctcctccaacacatggccat

SEQ ID NO: 10278 - DNA, 24 bp, Melanoplus sanguinipes entomopoxvirus
tggccaggatgctcttccgagacc

SEQ ID NO: 10279 - DNA, 20 bp, Homo sapiens
gcagctcctccgacgcagcc

SEQ ID NO: 10280 - DNA, 22 bp, Homo sapiens
ggagctccctgatgcacccaac

SEQ ID NO: 10281 - DNA, 19 bp, Homo sapiens
ggagctcctttgggtggcc

SEQ ID NO: 10282 - DNA, 18 bp, Homo sapiens
ggagctcctccgctgtgg

SEQ ID NO: 10283 - DNA, 20 bp, Homo sapiens
ggagttcctccaaaagaacc

SEQ ID NO: 10284 - DNA, 15 bp, Homo sapiens
ggagctcctctgccc

SEQ ID NO: 10285 - DNA, 18 bp, Homo sapiens
ggagctcctgcagcacat

SEQ ID NO: 10286 - DNA, 19 bp, Homo sapiens
tggccaggctgctctcgaa

SEQ ID NO: 10287 - DNA, 17 bp, Homo sapiens
ggccaggagttcgagac

SEQ ID NO: 10288 - DNA, 18 bp, Homo sapiens
tggccagggtctggcgag

SEQ ID NO: 10289 - DNA, 19 bp, Homo sapiens
tggccaggctgctttccaa

SEQ ID NO: 10290 - DNA, 19 bp, Homo sapiens
tggccagggtggtctcgaa

SEQ ID NO: 10291 - DNA, 22 bp, Homo sapiens
ggccagggtgtcatccgagacc

SEQ ID NO: 10292 - DNA, 18 bp, Homo sapiens
tggccaggatggtctcga

SEQ ID NO: 10293 - DNA, 16 bp, Homo sapiens
tgttcaggatgcgaga

SEQ ID NO: 10294 - DNA, 16 bp, Homo sapiens
ggccaggaaatccgag

SEQ ID NO: 10295 - DNA, 19 bp, Homo sapiens
tggtcaggatgctgcttcc

SEQ ID NO: 10296 - DNA, 16 bp, Homo sapiens
ggccaggatagccgag

SEQ ID NO: 10297 - DNA, 14 bp, Homo sapiens
gccaggatgctgag

SEQ ID NO: 10298 - DNA, 20 bp, Homo sapiens
ggtcggaaccttccgagacc

SEQ ID NO: 10299 - DNA, 18 bp, Homo sapiens
tggccaggtactggggcc

SEQ ID NO: 10300 - DNA, 21 bp, Homo sapiens
ggttggggtgttttccaagac

SEQ ID NO: 10301 - DNA, 25 bp, Homo sapiens
tggccaggatgcatctgctggggac

SEQ ID NO: 10302 - DNA, 16 bp, Homo sapiens
gctagggtcctccgag

SEQ ID NO: 10303 - DNA, 20 bp, Homo sapiens
ggccaggatacaccgggacc

SEQ ID NO: 10304 - DNA, 116 bp, Melanoplus sanguinipes entomopoxvirus
gcgtctgtattaaatatttctaaatttttaggtaataatatattttttaattgtaacttatctataatactatttatatgtaattcttttaaatttactaatatctttaaagatgt

SEQ ID NO: 10305 - DNA, 24 bp, Melanoplus sanguinipes entomopoxvirus
tctaaatttttaggtaataatata

SEQ ID NO: 10306 - DNA, 24 bp, Melanoplus sanguinipes entomopoxvirus
taattcttttaaatttactaatat

SEQ ID NO: 10307 - DNA, 19 bp, Homo sapiens
atttacaagtaataatata

SEQ ID NO: 10308 - DNA, 22 bp, Homo sapiens
tctaaattcttcacataatata

SEQ ID NO: 10309 - DNA, 64 bp, Melanoplus sanguinipes entomopoxvirus
acctctccaggtatacagaagagcgggagttttaacacctcctcaacgaactctcggatgaggt

SEQ ID NO: 10310 - DNA, 24 bp, Melanoplus sanguinipes entomopoxvirus
cctcaacgaactctcggatgaggt

SEQ ID NO: 10311 - DNA, 24 bp, Melanoplus sanguinipes entomopoxvirus
tctccaggtatacagaagagcggg

SEQ ID NO: 10312 - DNA, 16 bp, Homo sapiens
acgagctggatgaggt

SEQ ID NO: 10313 - DNA, 19 bp, Homo sapiens
tcaacgaattttaagaggt

SEQ ID NO: 10314 - DNA, 20 bp, Homo sapiens
tccccaggtgtacagacgag

SEQ ID NO: 10315 - DNA, 18 bp, Homo sapiens
tctggggtgcagagcagg

SEQ ID NO: 10316 - DNA, 23 bp, Homo sapiens
tcctaggtaagcaggagagcggg

SEQ ID NO: 10317 - DNA, 19 bp, Homo sapiens
tctccaggtgcgtagctgg

SEQ ID NO: 10318 - DNA, 15 bp, Homo sapiens
tctccaggcggaggg

SEQ ID NO: 10319 - DNA, 23 bp, Homo sapiens
tccccaggtaactgaggggcggg

SEQ ID NO: 10320 - DNA, 18 bp, Homo sapiens
aggtatttggaaaacagg

SEQ ID NO: 10321 - DNA, 20 bp, Homo sapiens
tccaggtaaatggacaaagg

SEQ ID NO: 10322 - DNA, 24 bp, Homo sapiens
tctccaggtgctgcaggcgatggg

SEQ ID NO: 10323 - DNA, 24 bp, Homo sapiens
cccaagcaggtgtgggagggcggg

SEQ ID NO: 10324 - DNA, 25 bp, Homo sapiens
tctccaagacatgcagaggagtggg

SEQ ID NO: 10325 - DNA, 22 bp, Homo sapiens
tccctaggtctgggagagcggg

SEQ ID NO: 10326 - DNA, 69 bp, Melanoplus sanguinipes entomopoxvirus
tgggggttgagtacttgggaccctccttatccaagtgaaaattagataaggaaaacccaagaccctcca

SEQ ID NO: 10327 - DNA, 23 bp, Melanoplus sanguinipes entomopoxvirus
taaggaaaacccaagaccctcca

SEQ ID NO: 10328 - DNA, 24 bp, Melanoplus sanguinipes entomopoxvirus
tgagtacttgggaccctccttatc

SEQ ID NO: 10329 - DNA, 19 bp, Homo sapiens
aaggaagacagaccctcca

SEQ ID NO: 10330 - DNA, 17 bp, Homo sapiens
taagaaaaagaccttcc

SEQ ID NO: 10331 - DNA, 25 bp, Homo sapiens
taagaaaagcctcaactctcctcca

SEQ ID NO: 10332 - DNA, 15 bp, Homo sapiens
aggaaaaccaccctc

SEQ ID NO: 10333 - DNA, 16 bp, Homo sapiens
aaggaagaccctttcc

SEQ ID NO: 10334 - DNA, 17 bp, Homo sapiens
caaggaaaacttcccct

SEQ ID NO: 10335 - DNA, 21 bp, Homo sapiens
ggccaggcccaagactctcca

SEQ ID NO: 10336 - DNA, 17 bp, Homo sapiens
gggaacccaaggtcctc

SEQ ID NO: 10337 - DNA, 16 bp, Homo sapiens
aaggaaaacctgaccc

SEQ ID NO: 10338 - DNA, 21 bp, Homo sapiens
taaggaaagctgagactcccc

SEQ ID NO: 10339 - DNA, 17 bp, Homo sapiens
aaggaaaatgactctcc

SEQ ID NO: 10340 - DNA, 22 bp, Homo sapiens
taaggaaacaccctaattgcct

SEQ ID NO: 10341 - DNA, 19 bp, Homo sapiens
aaggaaaattcaaaatcca

SEQ ID NO: 10342 - DNA, 18 bp, Homo sapiens
aagggcctggagaccctc

SEQ ID NO: 10343 - DNA, 22 bp, Homo sapiens
caaggaaaacttgtcagctcca

SEQ ID NO: 10344 - DNA, 18 bp, Homo sapiens
taaagaaaatactccctc

SEQ ID NO: 10345 - DNA, 20 bp, Homo sapiens
taaggaaaatacaaggggcc

SEQ ID NO: 10346 - DNA, 20 bp, Homo sapiens
aggaggcccaggaccctcca

SEQ ID NO: 10347 - DNA, 17 bp, Homo sapiens
ggaaagggagccctcca

SEQ ID NO: 10348 - DNA, 15 bp, Homo sapiens
gggaaacccaacctc

SEQ ID NO: 10349 - DNA, 16 bp, Homo sapiens
aagaccaagaccctcc

SEQ ID NO: 10350 - DNA, 21 bp, Homo sapiens
taaggaaaatacaacaattcc

SEQ ID NO: 10351 - DNA, 22 bp, Homo sapiens
agcttcccctcaagaccctcca

SEQ ID NO: 10352 - DNA, 22 bp, Homo sapiens
tgagtacttggaaagatgcctt

SEQ ID NO: 10353 - DNA, 23 bp, Homo sapiens
tgagtggttcttatttccttatc

SEQ ID NO: 10354 - DNA, 23 bp, Homo sapiens
tgggtactttctttctccttatc

SEQ ID NO: 10355 - DNA, 21 bp, Homo sapiens
tgaatgctgaccttccttatc

SEQ ID NO: 10356 - DNA, 20 bp, Homo sapiens
tgagcacttcagttctttat

SEQ ID NO: 10357 - DNA, 61 bp, Melanoplus sanguinipes entomopoxvirus
cccggtgattcaggactgcccctatttgacatgaagatgaatgtcgtcgcagtccaccggg

SEQ ID NO: 10358 - DNA, 18 bp, Melanoplus sanguinipes entomopoxvirus
tcgtcgcagtccaccggg

SEQ ID NO: 10359 - DNA, 24 bp, Melanoplus sanguinipes entomopoxvirus
ttcaggactgcccctatttgacat

SEQ ID NO: 10360 - DNA, 17 bp, Homo sapiens
tcctctgccccaccggg

SEQ ID NO: 10361 - DNA, 17 bp, Homo sapiens
tcctcccgcccaccggg

SEQ ID NO: 10362 - DNA, 16 bp, Homo sapiens
tcgccgcagttccggg

SEQ ID NO: 10363 - DNA, 16 bp, Homo sapiens
tcgccgcaggtccggg

SEQ ID NO: 10364 - DNA, 20 bp, Homo sapiens
tcgcgcgagcacgtaccggg

SEQ ID NO: 10365 - DNA, 15 bp, Homo sapiens
ccgtcgcagctcggg

SEQ ID NO: 10366 - DNA, 17 bp, Homo sapiens
tcctctcagccactggg

SEQ ID NO: 10367 - DNA, 21 bp, Homo sapiens
cgtcgcagtcgagcgactggg

SEQ ID NO: 10368 - DNA, 15 bp, Homo sapiens
tcgtgctccaccggg

SEQ ID NO: 10369 - DNA, 17 bp, Homo sapiens
tcgccgcagcgcccggg

SEQ ID NO: 10370 - DNA, 18 bp, Homo sapiens
atcgaagtctccaccggg

SEQ ID NO: 10371 - DNA, 16 bp, Homo sapiens
tcggcgcagccccggg

SEQ ID NO: 10372 - DNA, 17 bp, Homo sapiens
ccgtgttcaccaccggg

SEQ ID NO: 10373 - DNA, 18 bp, Homo sapiens
tcgcgcccgaccaccggg

SEQ ID NO: 10374 - DNA, 17 bp, Homo sapiens
tcatcgcagggtccggg

SEQ ID NO: 10375 - DNA, 16 bp, Homo sapiens
cctgacacccaccggg

SEQ ID NO: 10376 - DNA, 17 bp, Homo sapiens
tcctcgccgccaccggg

SEQ ID NO: 10377 - DNA, 20 bp, Homo sapiens
tcattgcagtccagcctggg

SEQ ID NO: 10378 - DNA, 16 bp, Homo sapiens
ccgtcgcagccccggg

SEQ ID NO: 10379 - DNA, 18 bp, Homo sapiens
tcgcagccccaaaccggg

SEQ ID NO: 10380 - DNA, 20 bp, Homo sapiens
ttcagaactgcttttatttg

SEQ ID NO: 10381 - DNA, 23 bp, Homo sapiens
ttcgggactaccctgaccgacat

SEQ ID NO: 10382 - DNA, 21 bp, Homo sapiens
ggggtgccccacccttggcat

SEQ ID NO: 10383 - DNA, 21 bp, Homo sapiens
ttcaagtattttcctatttga

SEQ ID NO: 10384 - DNA, 21 bp, Homo sapiens
agacaataccttatttgacat

SEQ ID NO: 10385 - DNA, 72 bp, Fowlpox virus
tatagatatttacggagtatatgaactgtataccgatttacagaatttgtatttggtacgtaagtatgtata

SEQ ID NO: 10386 - DNA, 23 bp, Fowlpox virus
tatttggtacgtaagtatgtata

SEQ ID NO: 10387 - DNA, 24 bp, Fowlpox virus
tacggagtatatgaactgtatacc

SEQ ID NO: 10388 - DNA, 17 bp, Homo sapiens
catttggtatgtatgta

SEQ ID NO: 10389 - DNA, 17 bp, Homo sapiens
atttggtatgtaacatg

SEQ ID NO: 10390 - DNA, 19 bp, Homo sapiens
taatatgtgagtatgtata

SEQ ID NO: 10391 - DNA, 23 bp, Homo sapiens
tattcggtgcgtatttgggtata

SEQ ID NO: 10392 - DNA, 17 bp, Homo sapiens
tatttggtagtaaaatg

SEQ ID NO: 10393 - DNA, 19 bp, Homo sapiens
tctgaatgtaggtatgtat

SEQ ID NO: 10394 - DNA, 20 bp, Homo sapiens
ttagcacaggagtatgtata

SEQ ID NO: 10395 - DNA, 20 bp, Homo sapiens
tacggagtgttacggtgtac

SEQ ID NO: 10396 - DNA, 18 bp, Homo sapiens
ggaatatataaaatatac

SEQ ID NO: 10397 - DNA, 18 bp, Homo sapiens
ggagtaaatgaactggat

SEQ ID NO: 10398 - DNA, 67 bp, Fowlpox virus
gtgatattgtggggtcgtgatgatattgactgtctgttggtgattctcaccctcattggcttattat

SEQ ID NO: 10399 - DNA, 24 bp, Fowlpox virus
ttgtggggtcgtgatgatattgac

SEQ ID NO: 10400 - DNA, 23 bp, Fowlpox virus
tctcaccctcattggcttattat

SEQ ID NO: 10401 - DNA, 19 bp, Homo sapiens
tctctccctcattccttat

SEQ ID NO: 10402 - DNA, 22 bp, Homo sapiens
cctcacttccccagcttattat

SEQ ID NO: 10403 - DNA, 20 bp, Homo sapiens
tcacaccctcatctgtgcct

SEQ ID NO: 10404 - DNA, 21 bp, Homo sapiens
tcagcctctttagcttattat

SEQ ID NO: 10405 - DNA, 68 bp, Infectious hypodermal and hematopoietic necrosis virus
gaggagctgccggttgccatttttcaagctgctaaaccacgagtggcagcaggcctaagaagctcctc

SEQ ID NO: 10406 - DNA, 22 bp, Infectious hypodermal and hematopoietic necrosis virus
cagcaggcctaagaagctcctc

SEQ ID NO: 10407 - DNA, 24 bp, Infectious hypodermal and hematopoietic necrosis virus
gagctgccggttgccatttttcaa

SEQ ID NO: 10408 - DNA, 21 bp, Homo sapiens
cagcagagctttcaactcctc

SEQ ID NO: 10409 - DNA, 18 bp, Homo sapiens
gcaggccctgggctcctc

SEQ ID NO: 10410 - DNA, 22 bp, Homo sapiens
cagcagttctcttcagctcctc

SEQ ID NO: 10411 - DNA, 16 bp, Homo sapiens
cagaaggcaagctcct

SEQ ID NO: 10412 - DNA, 14 bp, Homo sapiens
gcagcctagctcct

SEQ ID NO: 10413 - DNA, 17 bp, Homo sapiens
cagtggcctaaggtgct

SEQ ID NO: 10414 - DNA, 16 bp, Homo sapiens
cagcaagcctggtcct

SEQ ID NO: 10415 - DNA, 22 bp, Homo sapiens
acaggcctgggggaatggcctc

SEQ ID NO: 10416 - DNA, 17 bp, Homo sapiens
agtaggccaagaaattc

SEQ ID NO: 10417 - DNA, 15 bp, Homo sapiens
acagatgaagctcct

SEQ ID NO: 10418 - DNA, 18 bp, Homo sapiens
gcaggcctgagcttcctc

SEQ ID NO: 10419 - DNA, 19 bp, Homo sapiens
gccgtgccgggagctcctc

SEQ ID NO: 10420 - DNA, 16 bp, Homo sapiens
agtagtcctagctcct

SEQ ID NO: 10421 - DNA, 17 bp, Homo sapiens
cagaggcctaaggacct

SEQ ID NO: 10422 - DNA, 15 bp, Homo sapiens
cagcaggccaagctc

SEQ ID NO: 10423 - DNA, 20 bp, Homo sapiens
cagcaggccttggccgcctc

SEQ ID NO: 10424 - DNA, 15 bp, Homo sapiens
gcaggcccagctcct

SEQ ID NO: 10425 - DNA, 18 bp, Homo sapiens
gcaggcagagagctcctc

SEQ ID NO: 10426 - DNA, 18 bp, Homo sapiens
cagcaggctagcccactc

SEQ ID NO: 10427 - DNA, 21 bp, Homo sapiens
ggttctgaaaagaagctcctc

SEQ ID NO: 10428 - DNA, 21 bp, Homo sapiens
gccgggcctgcttagctcctc

SEQ ID NO: 10429 - DNA, 15 bp, Homo sapiens
cagaggcctaatctc

SEQ ID NO: 10430 - DNA, 16 bp, Homo sapiens
caggggcccagctcct

SEQ ID NO: 10431 - DNA, 17 bp, Homo sapiens
gccagacggaagctcct

SEQ ID NO: 10432 - DNA, 23 bp, Homo sapiens
cagcaggccatgggaccttcctc

SEQ ID NO: 10433 - DNA, 24 bp, Homo sapiens
cagcaggctgagtatgggctcctc

SEQ ID NO: 10434 - DNA, 21 bp, Homo sapiens
aacaggtccgaaaagctcttc

SEQ ID NO: 10435 - DNA, 15 bp, Homo sapiens
gcaagccttgctcct

SEQ ID NO: 10436 - DNA, 18 bp, Homo sapiens
cagaaggtctgtgcccct

SEQ ID NO: 10437 - DNA, 18 bp, Homo sapiens
gcaggcctgggactgcct

SEQ ID NO: 10438 - DNA, 22 bp, Homo sapiens
cagcaggcccaggagccggctc

SEQ ID NO: 10439 - DNA, 20 bp, Homo sapiens
cagcgcgccgccagctcctc

SEQ ID NO: 10440 - DNA, 18 bp, Homo sapiens
agcagggtagagctcctc

SEQ ID NO: 10441 - DNA, 17 bp, Homo sapiens
gcaggcaggagctcctc

SEQ ID NO: 10442 - DNA, 24 bp, Homo sapiens
gcaggcctttccctgaggcttctc

SEQ ID NO: 10443 - DNA, 17 bp, Homo sapiens
caggtaggccagctcct

SEQ ID NO: 10444 - DNA, 18 bp, Homo sapiens
gcaggcccaggaggactc

SEQ ID NO: 10445 - DNA, 19 bp, Homo sapiens
agcaggccaaggactgctc

SEQ ID NO: 10446 - DNA, 21 bp, Homo sapiens
cagctggttccaaagctcctc

SEQ ID NO: 10447 - DNA, 17 bp, Homo sapiens
caacaggcccagttcct

SEQ ID NO: 10448 - DNA, 16 bp, Homo sapiens
cagcaggccggagctc

SEQ ID NO: 10449 - DNA, 19 bp, Homo sapiens
caggggcctaaggtaactc

SEQ ID NO: 10450 - DNA, 18 bp, Homo sapiens
cagcaggccagcttaccc

SEQ ID NO: 10451 - DNA, 19 bp, Homo sapiens
gcaaagcaggaagctcctc

SEQ ID NO: 10452 - DNA, 19 bp, Homo sapiens
gcaggcctcctggcttctc

SEQ ID NO: 10453 - DNA, 15 bp, Homo sapiens
caggcctgagcccct

SEQ ID NO: 10454 - DNA, 17 bp, Homo sapiens
cagtggcctcaactcct

SEQ ID NO: 10455 - DNA, 16 bp, Homo sapiens
cagcaggctccctcct

SEQ ID NO: 10456 - DNA, 17 bp, Homo sapiens
gcagccaccagctcctc

SEQ ID NO: 10457 - DNA, 20 bp, Homo sapiens
agaaaaaaaaagaagctcct

SEQ ID NO: 10458 - DNA, 21 bp, Homo sapiens
cagcaggcctgggcgctgctc

SEQ ID NO: 10459 - DNA, 17 bp, Homo sapiens
caggagccaaagctcct

SEQ ID NO: 10460 - DNA, 17 bp, Homo sapiens
gcaggcctggccacctc

SEQ ID NO: 10461 - DNA, 16 bp, Homo sapiens
cagcaggcgagctcct

SEQ ID NO: 10462 - DNA, 21 bp, Homo sapiens
gcaggcctggagcagcttctc

SEQ ID NO: 10463 - DNA, 21 bp, Homo sapiens
cagcaggccatagggagaggc

SEQ ID NO: 10464 - DNA, 14 bp, Homo sapiens
gcaggccagctcct

SEQ ID NO: 10465 - DNA, 23 bp, Homo sapiens
cagtgggcccaagtgctgacctc

SEQ ID NO: 10466 - DNA, 17 bp, Homo sapiens
cagcaggcatgaatgct

SEQ ID NO: 10467 - DNA, 15 bp, Homo sapiens
gcaggcctggctcct

SEQ ID NO: 10468 - DNA, 19 bp, Homo sapiens
cagcagcctaagggaacct

SEQ ID NO: 10469 - DNA, 21 bp, Homo sapiens
cagcagcctaagaacgccctc

SEQ ID NO: 10470 - DNA, 16 bp, Homo sapiens
cagcaggccagagctc

SEQ ID NO: 10471 - DNA, 18 bp, Homo sapiens
acaggcctggacctcctc

SEQ ID NO: 10472 - DNA, 23 bp, Homo sapiens
cagcaggccagggatgcagcctc

SEQ ID NO: 10473 - DNA, 21 bp, Homo sapiens
cagcaggctgccaggtttctc

SEQ ID NO: 10474 - DNA, 14 bp, Homo sapiens
cagcaggcctagct

SEQ ID NO: 10475 - DNA, 18 bp, Homo sapiens
cagcaggcccaggagctc

SEQ ID NO: 10476 - DNA, 16 bp, Homo sapiens
cagcaggcctcttcct

SEQ ID NO: 10477 - DNA, 19 bp, Homo sapiens
acgggtctggcagctcctc

SEQ ID NO: 10478 - DNA, 16 bp, Homo sapiens
cagtcaggaagctcct

SEQ ID NO: 10479 - DNA, 17 bp, Homo sapiens
caacaggccttcctcct

SEQ ID NO: 10480 - DNA, 20 bp, Homo sapiens
acttgccttttgtttttcaa

SEQ ID NO: 10481 - DNA, 21 bp, Homo sapiens
gctgccgggtgcgccatcttt

SEQ ID NO: 10482 - DNA, 21 bp, Homo sapiens
gagttgcagaatcatttttca

SEQ ID NO: 10483 - DNA, 19 bp, Homo sapiens
gagttgttgttgccatttc

SEQ ID NO: 10484 - DNA, 63 bp, Infectious hypodermal and hematopoietic necrosis virus
tgttagccaacaacgacatccgtgtaccagaaatcttagcttggataatcatcgtagcagaca

SEQ ID NO: 10485 - DNA, 24 bp, Infectious hypodermal and hematopoietic necrosis virus
tagccaacaacgacatccgtgtac

SEQ ID NO: 10486 - DNA, 23 bp, Infectious hypodermal and hematopoietic necrosis virus
ttggataatcatcgtagcagaca

SEQ ID NO: 10487 - DNA, 17 bp, Homo sapiens
tagccaacaatgcatgt

SEQ ID NO: 10488 - DNA, 23 bp, Homo sapiens
tagccaacatggtgaagccctgt

SEQ ID NO: 10489 - DNA, 19 bp, Homo sapiens
gccagcaatctacccgtgt

SEQ ID NO: 10490 - DNA, 18 bp, Homo sapiens
gccaacaatatcctggta

SEQ ID NO: 10491 - DNA, 17 bp, Homo sapiens
gccaacaatgtcagtgc

SEQ ID NO: 10492 - DNA, 23 bp, Homo sapiens
tagccaacatggtgaaaccctgt

SEQ ID NO: 10493 - DNA, 20 bp, Homo sapiens
gccagcaactgtcccgtgta

SEQ ID NO: 10494 - DNA, 23 bp, Homo sapiens
ttgggtagcaacagcagcagaca

SEQ ID NO: 10495 - DNA, 19 bp, Homo sapiens
tggataatcattggtggac

SEQ ID NO: 10496 - DNA, 21 bp, Homo sapiens
ttggagcgttcgtagcaggca

SEQ ID NO: 10497 - DNA, 14 bp, Homo sapiens
ttggataacgcaac

SEQ ID NO: 10498 - DNA, 21 bp, Homo sapiens
ttggataaatacatgcaggca

SEQ ID NO: 10499 - DNA, 21 bp, Homo sapiens
ttggataatgcatcagcggca

SEQ ID NO: 10500 - DNA, 19 bp, Homo sapiens
ttgggaaatcatcagaaga

SEQ ID NO: 10501 - DNA, 19 bp, Homo sapiens
ttggataatagttaacaga

SEQ ID NO: 10502 - DNA, 64 bp, Infectious hypodermal and hematopoietic necrosis virus
tctcttcgaagaacccagaatcagtcaaataacagtggacgacttcaaactccttttcgaagga

SEQ ID NO: 10503 - DNA, 24 bp, Infectious hypodermal and hematopoietic necrosis virus
tcgaagaacccagaatcagtcaaa

SEQ ID NO: 10504 - DNA, 24 bp, Infectious hypodermal and hematopoietic necrosis virus
cgacttcaaactccttttcgaagg

SEQ ID NO: 10505 - DNA, 23 bp, Homo sapiens
gaagaatctcagcatcagtcaaa

SEQ ID NO: 10506 - DNA, 24 bp, Homo sapiens
tcaaagaactcagaactataatca

SEQ ID NO: 10507 - DNA, 18 bp, Homo sapiens
cggcttcaacttctcaag

SEQ ID NO: 10508 - DNA, 24 bp, Homo sapiens
cggcttcagctccctcccaggagg

SEQ ID NO: 10509 - DNA, 18 bp, Homo sapiens
cgacttcatgcttggaag

SEQ ID NO: 10510 - DNA, 20 bp, Homo sapiens
ctcaaactccttgcctcagg

SEQ ID NO: 10511 - DNA, 20 bp, Homo sapiens
cgacttcaagtttcttccca

SEQ ID NO: 10512 - DNA, 26 bp, Homo sapiens
gacttcaagtttgaggccttcgaaaa

SEQ ID NO: 10513 - DNA, 21 bp, Homo sapiens
cttcaaaggagatttcggagg

SEQ ID NO: 10514 - DNA, 20 bp, Homo sapiens
cttcaaacttctctcccagg

SEQ ID NO: 10515 - DNA, 27 bp, Homo sapiens
gacttcaaacgttaaggccttcgaaaa

SEQ ID NO: 10516 - DNA, 78 bp, Infectious hypodermal and hematopoietic necrosis virus
cccgtggggggtcttagtggaagtgacgtgctgtgaatacaggtccatagcaccgctatccactatgtctcgcccggg

SEQ ID NO: 10517 - DNA, 24 bp, Infectious hypodermal and hematopoietic necrosis virus
tagcaccgctatccactatgtctc

SEQ ID NO: 10518 - DNA, 24 bp, Infectious hypodermal and hematopoietic necrosis virus
tagtggaagtgacgtgctgtgaat

SEQ ID NO: 10519 - DNA, 24 bp, Homo sapiens
tagcaccgttaatctcgagggtct

SEQ ID NO: 10520 - DNA, 23 bp, Homo sapiens
cagcgcccgggccgctatgtctc

SEQ ID NO: 10521 - DNA, 21 bp, Homo sapiens
gcattgctacccacctaagtc

SEQ ID NO: 10522 - DNA, 17 bp, Homo sapiens
cagcacctccactatgt

SEQ ID NO: 10523 - DNA, 17 bp, Homo sapiens
tagaggtctgtgctgtg

SEQ ID NO: 10524 - DNA, 22 bp, Homo sapiens
tagtggaagttagcttgtgaat

SEQ ID NO: 10525 - DNA, 93 bp, Infectious hypodermal and hematopoietic necrosis virus
gtgtggagtctgttgagaatgccatgctatagtcataggattcaaaattgaacttgtttgttagttgtgtaaaatctttatagttattcatac

SEQ ID NO: 10526 - DNA, 24 bp, Infectious hypodermal and hematopoietic necrosis virus
gagaatgccatgctatagtcatag

SEQ ID NO: 10527 - DNA, 24 bp, Infectious hypodermal and hematopoietic necrosis virus
tgtgtaaaatctttatagttattc

SEQ ID NO: 10528 - DNA, 23 bp, Homo sapiens
gagaaagtgtgtgatagtcatag

SEQ ID NO: 10529 - DNA, 26 bp, Homo sapiens
gagaatgcagtgctgtacaatactag

SEQ ID NO: 10530 - DNA, 20 bp, Homo sapiens
gagaggccatgctgtgacat

SEQ ID NO: 10531 - DNA, 18 bp, Homo sapiens
gaggatgctctgccatag

SEQ ID NO: 10532 - DNA, 18 bp, Homo sapiens
gatgccatgtcaacatag

SEQ ID NO: 10533 - DNA, 20 bp, Homo sapiens
tgtggatccctatagttatt

SEQ ID NO: 10534 - DNA, 17 bp, Homo sapiens
tggtaaaatctttgtag

SEQ ID NO: 10535 - DNA, 78 bp, Infectious hypodermal and hematopoietic necrosis virus
tgtgccgcttggagggaaacatgaccacctgaagtctgttaaccaggtcagtggttttgtttccttgatagagacaca

SEQ ID NO: 10536 - DNA, 24 bp, Infectious hypodermal and hematopoietic necrosis virus
tcagtggttttgtttccttgatag

SEQ ID NO: 10537 - DNA, 24 bp, Infectious hypodermal and hematopoietic necrosis virus
aacatgaccacctgaagtctgtta

SEQ ID NO: 10538 - DNA, 21 bp, Homo sapiens
ccagtggttttgttttacttg

SEQ ID NO: 10539 - DNA, 17 bp, Homo sapiens
atggtttattcttgata

SEQ ID NO: 10540 - DNA, 20 bp, Homo sapiens
agtggtttgtttctctgtag

SEQ ID NO: 10541 - DNA, 22 bp, Homo sapiens
tcagtgtttttgtttctctcaa

SEQ ID NO: 10542 - DNA, 20 bp, Homo sapiens
aacatgactctaccactgtt

SEQ ID NO: 10543 - DNA, 21 bp, Homo sapiens
aacatgactctaccactgtta

SEQ ID NO: 10544 - DNA, 19 bp, Homo sapiens
tgagggtctgaagtctgtt

SEQ ID NO: 10545 - DNA, 19 bp, Homo sapiens
catgtggtttgagtctgtt

SEQ ID NO: 10546 - DNA, 22 bp, Homo sapiens
atgaccacatggcataacgtta

SEQ ID NO: 10547 - DNA, 24 bp, Homo sapiens
aacatgaccaaagtgaagtctgtt

SEQ ID NO: 10548 - DNA, 17 bp, Homo sapiens
aacatgacccttgaaat

SEQ ID NO: 10549 - DNA, 21 bp, Homo sapiens
acatgaccacagtcttctgtt

SEQ ID NO: 10550 - DNA, 15 bp, Homo sapiens
aacagaccagtctgt

SEQ ID NO: 10551 - DNA, 20 bp, Homo sapiens
catgaccagctgaggaactg

SEQ ID NO: 10552 - DNA, 21 bp, Homo sapiens
aacatggttacctgtgaactg

SEQ ID NO: 10553 - DNA, 19 bp, Homo sapiens
aacatgaccatcatggagc

SEQ ID NO: 10554 - DNA, 92 bp, Infectious hypodermal and hematopoietic necrosis virus
tttgatcggtgtagattttgttgtatttggttgaattctggtgtcgaatagaatttatctgtatggtccgcaaagtctatggcgggttcagg

SEQ ID NO: 10555 - DNA, 24 bp, Infectious hypodermal and hematopoietic necrosis virus
gattttgttgtatttggttgaatt

SEQ ID NO: 10556 - DNA, 24 bp, Infectious hypodermal and hematopoietic necrosis virus
tttatctgtatggtccgcaaagtc

SEQ ID NO: 10557 - DNA, 19 bp, Homo sapiens
gattttgtttaatatttgg

SEQ ID NO: 10558 - DNA, 22 bp, Homo sapiens
gattttgattgtatcttgggtt

SEQ ID NO: 10559 - DNA, 23 bp, Homo sapiens
tttatctgcatgtggtaggagtc

SEQ ID NO: 10560 - DNA, 21 bp, Homo sapiens
tttattagtatggccacaagt

SEQ ID NO: 10561 - DNA, 64 bp, Infectious hypodermal and hematopoietic necrosis virus
ctttagtgggaactagtgggagtgctgtgcctcgggtacccctatcctataggtcctaccggag

SEQ ID NO: 10562 - DNA, 24 bp, Infectious hypodermal and hematopoietic necrosis virus
tacccctatcctataggtcctacc

SEQ ID NO: 10563 - DNA, 24 bp, Infectious hypodermal and hematopoietic necrosis virus
tagtgggaactagtgggagtgctg

SEQ ID NO: 10564 - DNA, 23 bp, Homo sapiens
cctatcctgtacttctttctgcc

SEQ ID NO: 10565 - DNA, 22 bp, Homo sapiens
ccctatctccacaggtcctgcc

SEQ ID NO: 10566 - DNA, 20 bp, Homo sapiens
cccatcctgggttctctgcc

SEQ ID NO: 10567 - DNA, 24 bp, Homo sapiens
cctaccctatcatttggttctacc

SEQ ID NO: 10568 - DNA, 23 bp, Homo sapiens
cccctggtcctacatcacctacc

SEQ ID NO: 10569 - DNA, 15 bp, Homo sapiens
cccctatccggttct

SEQ ID NO: 10570 - DNA, 17 bp, Homo sapiens
cccccatcctgtgcacc

SEQ ID NO: 10571 - DNA, 21 bp, Homo sapiens
tacttctatcccaatccagtc

SEQ ID NO: 10572 - DNA, 23 bp, Homo sapiens
ccaagacatctgtgggtcctacc

SEQ ID NO: 10573 - DNA, 21 bp, Homo sapiens
ccaatccacaagtggttctac

SEQ ID NO: 10574 - DNA, 19 bp, Homo sapiens
cacccctgtcctctctgcc

SEQ ID NO: 10575 - DNA, 18 bp, Homo sapiens
cccttgtcaagtcctgcc

SEQ ID NO: 10576 - DNA, 18 bp, Homo sapiens
tacccctgtacatcctac

SEQ ID NO: 10577 - DNA, 15 bp, Homo sapiens
catctccgtcctacc

SEQ ID NO: 10578 - DNA, 16 bp, Homo sapiens
cagtgggagggggtgc

SEQ ID NO: 10579 - DNA, 17 bp, Homo sapiens
gtggggtggggagtgct

SEQ ID NO: 10580 - DNA, 14 bp, Homo sapiens
gtgggtgggagtgc

SEQ ID NO: 10581 - DNA, 18 bp, Homo sapiens
tagtgggagcgggtggga

SEQ ID NO: 10582 - DNA, 101 bp, Infectious hypodermal and hematopoietic necrosis virus
aggcattgttaacctttggtggaacctagtgttagtgttgtgctgtaaataagtgtccagcgcaccactagtcaccaggtgtcaccggaggctacttgcct

SEQ ID NO: 10583 - DNA, 24 bp, Infectious hypodermal and hematopoietic necrosis virus
aacctttggtggaacctagtgtta

SEQ ID NO: 10584 - DNA, 24 bp, Infectious hypodermal and hematopoietic necrosis virus
caccactagtcaccaggtgtcacc

SEQ ID NO: 10585 - DNA, 19 bp, Homo sapiens
cctttggctggaactggtg

SEQ ID NO: 10586 - DNA, 19 bp, Homo sapiens
ctttgctggagctcttgtt

SEQ ID NO: 10587 - DNA, 16 bp, Homo sapiens
accttggtttagtgtt

SEQ ID NO: 10588 - DNA, 19 bp, Homo sapiens
ccttggtggggccatcgct

SEQ ID NO: 10589 - DNA, 17 bp, Homo sapiens
acctttggtggggcagt

SEQ ID NO: 10590 - DNA, 16 bp, Homo sapiens
caccactagtagctca

SEQ ID NO: 10591 - DNA, 20 bp, Homo sapiens
ccactagtctacccagcacc

SEQ ID NO: 10592 - DNA, 26 bp, Homo sapiens
actagtcatttcccattggtgacacc

SEQ ID NO: 10593 - DNA, 24 bp, Homo sapiens
caccactagccactggtgagagcc

SEQ ID NO: 10594 - DNA, 16 bp, Homo sapiens
ccactagttatgttac

SEQ ID NO: 10595 - DNA, 14 bp, Homo sapiens
cactagtcactgtc

SEQ ID NO: 10596 - DNA, 18 bp, Homo sapiens
ccattagatgccaggtgc

SEQ ID NO: 10597 - DNA, 18 bp, Homo sapiens
actagtcattcagattgt

SEQ ID NO: 10598 - DNA, 18 bp, Homo sapiens
actagtcagcatgttatc

SEQ ID NO: 10599 - DNA, 19 bp, Homo sapiens
caccactaggtactaacac

SEQ ID NO: 10600 - DNA, 17 bp, Homo sapiens
cactagttgccagggcc

SEQ ID NO: 10601 - DNA, 18 bp, Homo sapiens
ctggtcaccagggttgcc

SEQ ID NO: 10602 - DNA, 18 bp, Homo sapiens
ctagtcaccatttccacc

SEQ ID NO: 10603 - DNA, 14 bp, Homo sapiens
accatagtgtgtca

SEQ ID NO: 10604 - DNA, 22 bp, Homo sapiens
caccactatcatcactttttgc

SEQ ID NO: 10605 - DNA, 19 bp, Homo sapiens
ccgctggtaccgaagcgcc

SEQ ID NO: 10606 - DNA, 18 bp, Homo sapiens
caccactagcaccctgcc

SEQ ID NO: 10607 - DNA, 19 bp, Homo sapiens
cactagccagcactgtcac

SEQ ID NO: 10608 - DNA, 18 bp, Homo sapiens
ccacagtcaccaagagcc

SEQ ID NO: 10609 - DNA, 19 bp, Homo sapiens
caccattagacacatcatc

SEQ ID NO: 10610 - DNA, 20 bp, Homo sapiens
accactaatcactgaatgcc

SEQ ID NO: 10611 - DNA, 17 bp, Homo sapiens
accacgcaggggtgttc

SEQ ID NO: 10612 - DNA, 20 bp, Homo sapiens
ctgtcattgccaggtgtcac

SEQ ID NO: 10613 - DNA, 21 bp, Homo sapiens
actatgtcaccagaagtcacc

SEQ ID NO: 10614 - DNA, 19 bp, Homo sapiens
cactttggtcaccagggtc

SEQ ID NO: 10615 - DNA, 20 bp, Homo sapiens
caccactagatgctggagcc

SEQ ID NO: 10616 - DNA, 17 bp, Homo sapiens
actgtcaccaaaataca

SEQ ID NO: 10617 - DNA, 20 bp, Homo sapiens
ctactccctctgggtgtcac

SEQ ID NO: 10618 - DNA, 15 bp, Homo sapiens
cactgtcatcctcac

SEQ ID NO: 10619 - DNA, 102 bp, Infectious hypodermal and hematopoietic necrosis virus
ggggctctgtaacatttggtgggacctgatgctgctggtgtgctgtaaataagtgcctagcacatcacgtaggcaccaggtgtcaccagggctacttgcctc

SEQ ID NO: 10620 - DNA, 24 bp, Infectious hypodermal and hematopoietic necrosis virus
atgctgctggtgtgctgtaaataa

SEQ ID NO: 10621 - DNA, 24 bp, Infectious hypodermal and hematopoietic necrosis virus
ctagcacatcacgtaggcaccagg

SEQ ID NO: 10622 - DNA, 19 bp, Homo sapiens
atgatccaaagtgctgtaa

SEQ ID NO: 10623 - DNA, 22 bp, Homo sapiens
atggtgctaatattgtagataa

SEQ ID NO: 10624 - DNA, 24 bp, Homo sapiens
atgccgctggtgtgccagctcata

SEQ ID NO: 10625 - DNA, 19 bp, Homo sapiens
tgctgctgtgtgtcaccat

SEQ ID NO: 10626 - DNA, 22 bp, Homo sapiens
atgtgctgatgcctgtagataa

SEQ ID NO: 10627 - DNA, 19 bp, Homo sapiens
atgatgctggtgtgaataa

SEQ ID NO: 10628 - DNA, 19 bp, Homo sapiens
atgctgtggtgtttggaaa

SEQ ID NO: 10629 - DNA, 17 bp, Homo sapiens
acattatgaacaccagg

SEQ ID NO: 10630 - DNA, 17 bp, Homo sapiens
ctagcacacgtgcaccg

SEQ ID NO: 10631 - DNA, 21 bp, Homo sapiens
cagcacatcagtgtcactggg

SEQ ID NO: 10632 - DNA, 23 bp, Homo sapiens
cagcacatgtgctgggcaccagg

SEQ ID NO: 10633 - DNA, 20 bp, Homo sapiens
tagcaacattgtaaacacca

SEQ ID NO: 10634 - DNA, 15 bp, Homo sapiens
gcacagaggcaccag

SEQ ID NO: 10635 - DNA, 19 bp, Homo sapiens
ccagcacatcaccagccag

SEQ ID NO: 10636 - DNA, 18 bp, Homo sapiens
ccagccctgtaggcactg

SEQ ID NO: 10637 - DNA, 18 bp, Homo sapiens
ctagcacacgttttccca

SEQ ID NO: 10638 - DNA, 61 bp, Infectious hypodermal and hematopoietic necrosis virus
ggcaggtggagtgggacacagttagagaacattagtcctctggtccctatctccacccgcc

SEQ ID NO: 10639 - DNA, 22 bp, Infectious hypodermal and hematopoietic necrosis virus
ctggtccctatctccacccgcc

SEQ ID NO: 10640 - DNA, 24 bp, Infectious hypodermal and hematopoietic necrosis virus
aggtggagtgggacacagttagag

SEQ ID NO: 10641 - DNA, 18 bp, Homo sapiens
ctgatgccctccacctgc

SEQ ID NO: 10642 - DNA, 19 bp, Homo sapiens
ctggctcctgactcctgcc

SEQ ID NO: 10643 - DNA, 18 bp, Homo sapiens
ctggttccaccacccgcc

SEQ ID NO: 10644 - DNA, 23 bp, Homo sapiens
ctggatttcctcacccacctgcc

SEQ ID NO: 10645 - DNA, 19 bp, Homo sapiens
tggtcccttatctgtagcc

SEQ ID NO: 10646 - DNA, 20 bp, Homo sapiens
ctggttctatcccttttgcc

SEQ ID NO: 10647 - DNA, 20 bp, Homo sapiens
ctgatcccctaatgtctgcc

SEQ ID NO: 10648 - DNA, 18 bp, Homo sapiens
tggcccctatttcctgcc

SEQ ID NO: 10649 - DNA, 19 bp, Homo sapiens
ctggtcccatggtcctgcc

SEQ ID NO: 10650 - DNA, 18 bp, Homo sapiens
ctggatgcctccacctgc

SEQ ID NO: 10651 - DNA, 14 bp, Homo sapiens
tggttcccacccgc

SEQ ID NO: 10652 - DNA, 21 bp, Homo sapiens
ctggatccgcgcccacctgcc

SEQ ID NO: 10653 - DNA, 17 bp, Homo sapiens
ctagcctcttcacccgc

SEQ ID NO: 10654 - DNA, 22 bp, Homo sapiens
ctagtccccctggctacctgcc

SEQ ID NO: 10655 - DNA, 18 bp, Homo sapiens
tggtccctgttccccgcc

SEQ ID NO: 10656 - DNA, 15 bp, Homo sapiens
ccggtccctgacccg

SEQ ID NO: 10657 - DNA, 18 bp, Homo sapiens
ggtccccatccgcccgcc

SEQ ID NO: 10658 - DNA, 17 bp, Homo sapiens
ccggtttccccgcctgc

SEQ ID NO: 10659 - DNA, 21 bp, Homo sapiens
ctggtccccatctctgcagcc

SEQ ID NO: 10660 - DNA, 22 bp, Homo sapiens
ctggtccccatttgactttgcc

SEQ ID NO: 10661 - DNA, 19 bp, Homo sapiens
ctggtcccctttacccgcc

SEQ ID NO: 10662 - DNA, 16 bp, Homo sapiens
ggccccgccccacccg

SEQ ID NO: 10663 - DNA, 20 bp, Homo sapiens
ctgatccctggccaccgtcc

SEQ ID NO: 10664 - DNA, 22 bp, Homo sapiens
ccggtcccccgctccgtccgcc

SEQ ID NO: 10665 - DNA, 18 bp, Homo sapiens
cggtttttctcacccgcc

SEQ ID NO: 10666 - DNA, 18 bp, Homo sapiens
ctggtccccttgcccgcc

SEQ ID NO: 10667 - DNA, 22 bp, Homo sapiens
ggtctccacccctccgcccgcc

SEQ ID NO: 10668 - DNA, 20 bp, Homo sapiens
ctgttcccctcacacccgcc

SEQ ID NO: 10669 - DNA, 23 bp, Homo sapiens
ctggtgtcttcctgccacccgcc

SEQ ID NO: 10670 - DNA, 17 bp, Homo sapiens
ctagtcccaccacctgc

SEQ ID NO: 10671 - DNA, 20 bp, Homo sapiens
cggtccccaagttgcccgcc

SEQ ID NO: 10672 - DNA, 16 bp, Homo sapiens
ctggtcccgcccccgc

SEQ ID NO: 10673 - DNA, 18 bp, Homo sapiens
tggtcccttttctgtgcc

SEQ ID NO: 10674 - DNA, 19 bp, Homo sapiens
ctggtcccgcccgcccgcc

SEQ ID NO: 10675 - DNA, 16 bp, Homo sapiens
ctggtcccgctcccgc

SEQ ID NO: 10676 - DNA, 19 bp, Homo sapiens
ctgctccaccccgcccgcc

SEQ ID NO: 10677 - DNA, 24 bp, Homo sapiens
ctgatccctagaaagtcacctgcc

SEQ ID NO: 10678 - DNA, 18 bp, Homo sapiens
ctggtctccacacccgcc

SEQ ID NO: 10679 - DNA, 20 bp, Homo sapiens
ctgatcaggctccatctgcc

SEQ ID NO: 10680 - DNA, 20 bp, Homo sapiens
ctggcccccctatcgcccgc

SEQ ID NO: 10681 - DNA, 19 bp, Homo sapiens
aggtgagtgggaaggtaga

SEQ ID NO: 10682 - DNA, 16 bp, Homo sapiens
aggtgagtgggaaagt

SEQ ID NO: 10683 - DNA, 16 bp, Homo sapiens
aggtggggtggggcag

SEQ ID NO: 10684 - DNA, 17 bp, Homo sapiens
ggtggggtagagttaga

SEQ ID NO: 10685 - DNA, 15 bp, Homo sapiens
aggtgggtggggcag

SEQ ID NO: 10686 - DNA, 23 bp, Homo sapiens
agatggatgatgtgtggttggag

SEQ ID NO: 10687 - DNA, 19 bp, Homo sapiens
ggtggagtgggatcatcag

SEQ ID NO: 10688 - DNA, 18 bp, Homo sapiens
ggaggggtgcaggttgga

SEQ ID NO: 10689 - DNA, 17 bp, Homo sapiens
ggtggggtgagatgagt

SEQ ID NO: 10690 - DNA, 17 bp, Homo sapiens
ggtggggtggggtgaga

SEQ ID NO: 10691 - DNA, 17 bp, Homo sapiens
aggggagtggggctgag

SEQ ID NO: 10692 - DNA, 17 bp, Homo sapiens
ggaggggtgggagtaga

SEQ ID NO: 10693 - DNA, 16 bp, Homo sapiens
aggtggtgtgggttag

SEQ ID NO: 10694 - DNA, 20 bp, Homo sapiens
ggtggagagggaacctttag

SEQ ID NO: 10695 - DNA, 21 bp, Homo sapiens
aggctggagtggggcacacag

SEQ ID NO: 10696 - DNA, 78 bp, Human papillomavirus type 90
caagcctgctgctcaattgtatatattcctcttgtgttgtagtgtgcaatagtagtatgtatcctgttgtagtacgtg

SEQ ID NO: 10697 - DNA, 24 bp, Human papillomavirus type 90
tgtatatattcctcttgtgttgta

SEQ ID NO: 10698 - DNA, 24 bp, Human papillomavirus type 90
tagtatgtatcctgttgtagtacg

SEQ ID NO: 10699 - DNA, 20 bp, Homo sapiens
tgtatatatttcccttacat

SEQ ID NO: 10700 - DNA, 23 bp, Homo sapiens
tgtattgagagagtttgtgttgt

SEQ ID NO: 10701 - DNA, 20 bp, Homo sapiens
tactatgtatcttgactgta

SEQ ID NO: 10702 - DNA, 18 bp, Homo sapiens
agtatgtatcttatgtgt

SEQ ID NO: 10703 - DNA, 88 bp, Human papillomavirus type 90
gtcgtgcagtcccagcgagcgcagcggtaccaggtaacgcggacacgtgtcacaaaacgtctgcaccgcctgtcgggccagcacgtac

SEQ ID NO: 10704 - DNA, 24 bp, Human papillomavirus type 90
tcacaaaacgtctgcaccgcctgt

SEQ ID NO: 10705 - DNA, 24 bp, Human papillomavirus type 90
agcggtaccaggtaacgcggacac

SEQ ID NO: 10706 - DNA, 20 bp, Homo sapiens
agcggcactgcggtgggcgc

SEQ ID NO: 10707 - DNA, 18 bp, Homo sapiens
agcagtaccaggtagcag

SEQ ID NO: 10708 - DNA, 18 bp, Homo sapiens
agcggtaccagggaatac

SEQ ID NO: 10709 - DNA, 14 bp, Homo sapiens
gcggtaccgggcgg

SEQ ID NO: 10710 - DNA, 20 bp, Homo sapiens
gcggctgcgtggacgcggac

SEQ ID NO: 10711 - DNA, 61 bp, Human papillomavirus type 90
ggtaagttaacagagttttttataaaaatctggtatgattctataagcttgttaactagct

SEQ ID NO: 10712 - DNA, 24 bp, Human papillomavirus type 90
taagttaacagagttttttataaa

SEQ ID NO: 10713 - DNA, 18 bp, Human papillomavirus type 90
taagcttgttaactagct

SEQ ID NO: 10714 - DNA, 19 bp, Homo sapiens
taagttaacaggtttctca

SEQ ID NO: 10715 - DNA, 18 bp, Homo sapiens
taagcctgtaaactagct

SEQ ID NO: 10716 - DNA, 18 bp, Homo sapiens
taagattgaaaactagct

SEQ ID NO: 10717 - DNA, 16 bp, Homo sapiens
taagcttgggacagct

SEQ ID NO: 10718 - DNA, 17 bp, Homo sapiens
caagcctgtagctggct

SEQ ID NO: 10719 - DNA, 18 bp, Homo sapiens
taagcttgtgtccaggct

SEQ ID NO: 10720 - DNA, 17 bp, Homo sapiens
caagtattcaactagct

SEQ ID NO: 10721 - DNA, 15 bp, Homo sapiens
caagatcaactagct

SEQ ID NO: 10722 - DNA, 23 bp, Homo sapiens
agcctgttagcacgtactggcta

SEQ ID NO: 10723 - DNA, 60 bp, Human papillomavirus type 90
atttagtttcacactccactagccaagtgagttccgggttgttggggtcgaagactagat

SEQ ID NO: 10724 - DNA, 18 bp, Human papillomavirus type 90
tggggtcgaagactagat

SEQ ID NO: 10725 - DNA, 24 bp, Human papillomavirus type 90
ttagtttcacactccactagccaa

SEQ ID NO: 10726 - DNA, 17 bp, Homo sapiens
tggggtcagggccagat

SEQ ID NO: 10727 - DNA, 19 bp, Homo sapiens
tagaatcacaggactggat

SEQ ID NO: 10728 - DNA, 16 bp, Homo sapiens
tggggtcagacctgat

SEQ ID NO: 10729 - DNA, 18 bp, Homo sapiens
tggtggtcctgactagat

SEQ ID NO: 10730 - DNA, 17 bp, Homo sapiens
tggaatctggactagat

SEQ ID NO: 10731 - DNA, 18 bp, Homo sapiens
tggtgtaacagactagat

SEQ ID NO: 10732 - DNA, 15 bp, Homo sapiens
tggggtggaacagat

SEQ ID NO: 10733 - DNA, 16 bp, Homo sapiens
tagggcatgactagat

SEQ ID NO: 10734 - DNA, 18 bp, Homo sapiens
gtttcacacattcactag

SEQ ID NO: 10735 - DNA, 14 bp, Homo sapiens
ttagtttcaccact

SEQ ID NO: 10736 - DNA, 20 bp, Homo sapiens
ttagtttcatttcctcccag

SEQ ID NO: 10737 - DNA, 19 bp, Homo sapiens
tcaacatcattccactagc

SEQ ID NO: 10738 - DNA, 25 bp, Homo sapiens
ttagcttcacagaaaggactagcca

SEQ ID NO: 10739 - DNA, 20 bp, Homo sapiens
ctagttttcaatactagcca

SEQ ID NO: 10740 - DNA, 19 bp, Homo sapiens
ttagtttcaagctcgctaa

SEQ ID NO: 10741 - DNA, 19 bp, Homo sapiens
gctagcctttactagccaa

SEQ ID NO: 10742 - DNA, 61 bp, Human papillomavirus type 90
gccgcagggcacctggccggcgtgccgccgaagggccgctatcagggcctcgagctgcggc

SEQ ID NO: 10743 - DNA, 22 bp, Human papillomavirus type 90
tatcagggcctcgagctgcggc

SEQ ID NO: 10744 - DNA, 24 bp, Human papillomavirus type 90
cagggcacctggccggcgtgccgc

SEQ ID NO: 10745 - DNA, 16 bp, Homo sapiens
tcagggccttgagagg

SEQ ID NO: 10746 - DNA, 23 bp, Homo sapiens
taccagggtgagagggctgtggc

SEQ ID NO: 10747 - DNA, 17 bp, Homo sapiens
cagggtttctaaccggc

SEQ ID NO: 10748 - DNA, 19 bp, Homo sapiens
tatcggggccccggagccg

SEQ ID NO: 10749 - DNA, 17 bp, Homo sapiens
tcagtgggggctgcggc

SEQ ID NO: 10750 - DNA, 17 bp, Homo sapiens
tatcagggtcagtgtgg

SEQ ID NO: 10751 - DNA, 18 bp, Homo sapiens
tcagggcctcagcctggc

SEQ ID NO: 10752 - DNA, 17 bp, Homo sapiens
ccggggcctcgccgggc

SEQ ID NO: 10753 - DNA, 16 bp, Homo sapiens
tatcagggttcaccgg

SEQ ID NO: 10754 - DNA, 20 bp, Homo sapiens
tcagagtttgcagctgcggc

SEQ ID NO: 10755 - DNA, 16 bp, Homo sapiens
cagggccttgctgggg

SEQ ID NO: 10756 - DNA, 16 bp, Homo sapiens
atcggggcctcgaggc

SEQ ID NO: 10757 - DNA, 25 bp, Homo sapiens
gggcacctggctgttgcggcacgcc

SEQ ID NO: 10758 - DNA, 19 bp, Homo sapiens
gggcacctgccaggctcgc

SEQ ID NO: 10759 - DNA, 18 bp, Homo sapiens
cagggggcctggccggcg

SEQ ID NO: 10760 - DNA, 21 bp, Homo sapiens
cagggccctggccacacttgc

SEQ ID NO: 10761 - DNA, 18 bp, Homo sapiens
ggggacctggccgggcgc

SEQ ID NO: 10762 - DNA, 17 bp, Homo sapiens
agggtgtctggccgggt

SEQ ID NO: 10763 - DNA, 20 bp, Homo sapiens
gggcacctgctcgccagtgt

SEQ ID NO: 10764 - DNA, 18 bp, Homo sapiens
gggtgcctggccgggggc

SEQ ID NO: 10765 - DNA, 15 bp, Homo sapiens
gggcgccggcgctgc

SEQ ID NO: 10766 - DNA, 20 bp, Homo sapiens
aggcgcctggccgctgccgc

SEQ ID NO: 10767 - DNA, 21 bp, Homo sapiens
cagggcacctgctgtgacctg

SEQ ID NO: 10768 - DNA, 22 bp, Homo sapiens
cagggcactgggcccgttctgc

SEQ ID NO: 10769 - DNA, 25 bp, Homo sapiens
gggcacctgctggccgtgcggcacg

SEQ ID NO: 10770 - DNA, 18 bp, Homo sapiens
cagggcactggctgcctg

SEQ ID NO: 10771 - DNA, 18 bp, Homo sapiens
gggcacctggccccttgc

SEQ ID NO: 10772 - DNA, 21 bp, Homo sapiens
cagggcactggacgctgctgc

SEQ ID NO: 10773 - DNA, 21 bp, Homo sapiens
ggggggctgttggcgtgccgc

SEQ ID NO: 10774 - DNA, 18 bp, Homo sapiens
gggtgcctggccgcggtg

SEQ ID NO: 10775 - DNA, 21 bp, Homo sapiens
gggcgcctggctccgtgccgc

SEQ ID NO: 10776 - DNA, 19 bp, Homo sapiens
ggggtgtctggctggcgtg

SEQ ID NO: 10777 - DNA, 19 bp, Homo sapiens
gggcacctggcctgggccg

SEQ ID NO: 10778 - DNA, 114 bp, Human papillomavirus type 90
gctgcggctggtgctgcagctgctgctggaaaaccgacggcgtctgcgccgcaagctgcgtcggcgcctgcgccggatgtaccggcacttcgtccagctgcagcgcgccgcggc

SEQ ID NO: 10779 - DNA, 24 bp, Human papillomavirus type 90
ctgcagctgctgctggaaaaccga

SEQ ID NO: 10780 - DNA, 22 bp, Human papillomavirus type 90
tccagctgcagcgcgccgcggc

SEQ ID NO: 10781 - DNA, 19 bp, Homo sapiens
ctgcagctgctttggtcca

SEQ ID NO: 10782 - DNA, 19 bp, Homo sapiens
ctgcagctactgcgggccg

SEQ ID NO: 10783 - DNA, 18 bp, Homo sapiens
tgagctgctgctgtcacg

SEQ ID NO: 10784 - DNA, 22 bp, Homo sapiens
gcggctgctgcttggcagtcga

SEQ ID NO: 10785 - DNA, 18 bp, Homo sapiens
ctgtagctgctgctggaa

SEQ ID NO: 10786 - DNA, 19 bp, Homo sapiens
ctggcggctgctggggccg

SEQ ID NO: 10787 - DNA, 19 bp, Homo sapiens
ctgaggctgccggggctgg

SEQ ID NO: 10788 - DNA, 17 bp, Homo sapiens
gcggctactggacacga

SEQ ID NO: 10789 - DNA, 19 bp, Homo sapiens
cagctacttgggaggccga

SEQ ID NO: 10790 - DNA, 19 bp, Homo sapiens
ctgcagctgttctgcctgg

SEQ ID NO: 10791 - DNA, 20 bp, Homo sapiens
ctgcagctgatgaagactgg

SEQ ID NO: 10792 - DNA, 22 bp, Homo sapiens
ctgcgctgctgaggaggggccg

SEQ ID NO: 10793 - DNA, 19 bp, Homo sapiens
ctgctgttgctgctgctgg

SEQ ID NO: 10794 - DNA, 14 bp, Homo sapiens
tgagccctggaaaa

SEQ ID NO: 10795 - DNA, 17 bp, Homo sapiens
gcggctgccggggaccg

SEQ ID NO: 10796 - DNA, 23 bp, Homo sapiens
ctgctgctgctgctgcgcgccga

SEQ ID NO: 10797 - DNA, 21 bp, Homo sapiens
tgtagctgctgctggccacca

SEQ ID NO: 10798 - DNA, 15 bp, Homo sapiens
cagctgctgtagccg

SEQ ID NO: 10799 - DNA, 18 bp, Homo sapiens
ccgcagctgctgcgccgg

SEQ ID NO: 10800 - DNA, 18 bp, Homo sapiens
ctgcagcttctgaaaccg

SEQ ID NO: 10801 - DNA, 22 bp, Homo sapiens
ctgcaactggaacggaaagtcg

SEQ ID NO: 10802 - DNA, 18 bp, Homo sapiens
tgcggctgctagagctgg

SEQ ID NO: 10803 - DNA, 18 bp, Homo sapiens
ccgcggctgcggggctgg

SEQ ID NO: 10804 - DNA, 18 bp, Homo sapiens
ctgggctgccgggagccg

SEQ ID NO: 10805 - DNA, 16 bp, Homo sapiens
ctgagctgctgtgacc

SEQ ID NO: 10806 - DNA, 18 bp, Homo sapiens
gctgccgctgggggaccg

SEQ ID NO: 10807 - DNA, 18 bp, Homo sapiens
ctgctgctgctgctgcga

SEQ ID NO: 10808 - DNA, 17 bp, Homo sapiens
ctgtgctgctgtgaaac

SEQ ID NO: 10809 - DNA, 22 bp, Homo sapiens
gcggctgctgctagggagtcga

SEQ ID NO: 10810 - DNA, 18 bp, Homo sapiens
ctgtgctgctgtgactgg

SEQ ID NO: 10811 - DNA, 20 bp, Homo sapiens
tgagctgctgggcaagaccg

SEQ ID NO: 10812 - DNA, 18 bp, Homo sapiens
ctgctgctgctgctgccg

SEQ ID NO: 10813 - DNA, 21 bp, Homo sapiens
ctgctgctgctgctgctgccg

SEQ ID NO: 10814 - DNA, 20 bp, Homo sapiens
ctgccgctgcagcagagccg

SEQ ID NO: 10815 - DNA, 19 bp, Homo sapiens
ctgtgctgccaggggccgg

SEQ ID NO: 10816 - DNA, 23 bp, Homo sapiens
gcagctgcacctcggggagtcga

SEQ ID NO: 10817 - DNA, 21 bp, Homo sapiens
ctgcagctccctcaagactgg

SEQ ID NO: 10818 - DNA, 19 bp, Homo sapiens
ctgcagctgcttctgccgg

SEQ ID NO: 10819 - DNA, 19 bp, Homo sapiens
ctgcactgccgggggccgg

SEQ ID NO: 10820 - DNA, 18 bp, Homo sapiens
ctgcagctccagggctgg

SEQ ID NO: 10821 - DNA, 20 bp, Homo sapiens
tgcagctgctgttgctctgg

SEQ ID NO: 10822 - DNA, 18 bp, Homo sapiens
ctgctggctgctgctccg

SEQ ID NO: 10823 - DNA, 18 bp, Homo sapiens
ctgcaactgctaggggaa

SEQ ID NO: 10824 - DNA, 18 bp, Homo sapiens
ctgcagcagtaaaaaccg

SEQ ID NO: 10825 - DNA, 19 bp, Homo sapiens
acttgctgctgcaaactga

SEQ ID NO: 10826 - DNA, 18 bp, Homo sapiens
ctacagctgcagggctga

SEQ ID NO: 10827 - DNA, 17 bp, Homo sapiens
tctgtctgcagcacggc

SEQ ID NO: 10828 - DNA, 22 bp, Homo sapiens
tcctgctgcagccaacagtggc

SEQ ID NO: 10829 - DNA, 18 bp, Homo sapiens
tctagccagcgccgcggc

SEQ ID NO: 10830 - DNA, 18 bp, Homo sapiens
tccagccgcagcggaggc

SEQ ID NO: 10831 - DNA, 18 bp, Homo sapiens
gcggctccgcgccgcggc

SEQ ID NO: 10832 - DNA, 16 bp, Homo sapiens
gctgcagcggacaggc

SEQ ID NO: 10833 - DNA, 22 bp, Homo sapiens
tccagctgtactttcaggcggc

SEQ ID NO: 10834 - DNA, 17 bp, Homo sapiens
tccagctgcatcggtgc

SEQ ID NO: 10835 - DNA, 18 bp, Homo sapiens
tccagctgcggccacggc

SEQ ID NO: 10836 - DNA, 19 bp, Homo sapiens
cccagctgcagccgctggc

SEQ ID NO: 10837 - DNA, 16 bp, Homo sapiens
tccggcgcagcgcggc

SEQ ID NO: 10838 - DNA, 16 bp, Homo sapiens
tccggcgcagcgccgg

SEQ ID NO: 10839 - DNA, 23 bp, Homo sapiens
tccggcagcagcgcagtgccgcg

SEQ ID NO: 10840 - DNA, 17 bp, Homo sapiens
cagcttggcgccgcggc

SEQ ID NO: 10841 - DNA, 18 bp, Homo sapiens
tccagctgcactccaagg

SEQ ID NO: 10842 - DNA, 19 bp, Homo sapiens
tccgctgcagcccgccggc

SEQ ID NO: 10843 - DNA, 16 bp, Homo sapiens
tccagtcccgccgcgg

SEQ ID NO: 10844 - DNA, 21 bp, Homo sapiens
cccgggcgcgcgcgccgcggc

SEQ ID NO: 10845 - DNA, 19 bp, Homo sapiens
tccagctgcgctgcacagc

SEQ ID NO: 10846 - DNA, 16 bp, Homo sapiens
tccggcgcggccacgg

SEQ ID NO: 10847 - DNA, 21 bp, Homo sapiens
tccactgcagccatgggtggc

SEQ ID NO: 10848 - DNA, 17 bp, Homo sapiens
tccagctgcacgcctgc

SEQ ID NO: 10849 - DNA, 19 bp, Homo sapiens
cccagctgcagccaggccg

SEQ ID NO: 10850 - DNA, 20 bp, Homo sapiens
tccagctgtggcttgactgc

SEQ ID NO: 10851 - DNA, 19 bp, Homo sapiens
tcgagcgcagcgccgcggc

SEQ ID NO: 10852 - DNA, 21 bp, Homo sapiens
cccggctccaaatgccgcggc

SEQ ID NO: 10853 - DNA, 21 bp, Homo sapiens
tccagctgtgggcccagtggc

SEQ ID NO: 10854 - DNA, 19 bp, Homo sapiens
tccgcgctaccgccgcggc

SEQ ID NO: 10855 - DNA, 18 bp, Homo sapiens
tccagctgctgcgcccgc

SEQ ID NO: 10856 - DNA, 23 bp, Homo sapiens
cccagctgtcagcaagccgtggc

SEQ ID NO: 10857 - DNA, 18 bp, Homo sapiens
cccagctgcagctggcgc

SEQ ID NO: 10858 - DNA, 18 bp, Homo sapiens
caggctgcagcacctggc

SEQ ID NO: 10859 - DNA, 21 bp, Homo sapiens
tccaactgtaggatgtgcggc

SEQ ID NO: 10860 - DNA, 19 bp, Homo sapiens
tccggctgcagccgccagc

SEQ ID NO: 10861 - DNA, 19 bp, Homo sapiens
tccagctgctgcccgcggc

SEQ ID NO: 10862 - DNA, 16 bp, Homo sapiens
caggctgcagccctgg

SEQ ID NO: 10863 - DNA, 22 bp, Homo sapiens
tccagcagcagcacgacgtggc

SEQ ID NO: 10864 - DNA, 24 bp, Homo sapiens
tctggctgcagctcttcaggcggc

SEQ ID NO: 10865 - DNA, 17 bp, Homo sapiens
actgcccgcaccgcggc

SEQ ID NO: 10866 - DNA, 25 bp, Homo sapiens
cccagctgcagacctgagttgcggc

SEQ ID NO: 10867 - DNA, 18 bp, Homo sapiens
tccagctgcagcctgagc

SEQ ID NO: 10868 - DNA, 19 bp, Homo sapiens
tccagctgcagggctgagg

SEQ ID NO: 10869 - DNA, 22 bp, Homo sapiens
tccagctggcagcgcagggggc

SEQ ID NO: 10870 - DNA, 25 bp, Homo sapiens
tccagctgtagttgggggacgcggc

SEQ ID NO: 10871 - DNA, 22 bp, Homo sapiens
tccagctgggggtgcctgtggc

SEQ ID NO: 10872 - DNA, 16 bp, Homo sapiens
tccagctgggcgcggc

SEQ ID NO: 10873 - DNA, 19 bp, Homo sapiens
tccgtgctgctcgccgcgg

SEQ ID NO: 10874 - DNA, 23 bp, Homo sapiens
tctggctgcagcacagtgccgcg

SEQ ID NO: 10875 - DNA, 24 bp, Homo sapiens
tccagctgtgcaggtggcgccgcg

SEQ ID NO: 10876 - DNA, 20 bp, Homo sapiens
cagctgcaaggccgcgcggc

SEQ ID NO: 10877 - DNA, 20 bp, Homo sapiens
ccccgcccagcgcgccgcgg

SEQ ID NO: 10878 - DNA, 68 bp, Human papillomavirus type 90
ttctaagtgtgcaggtgtgagtaactttgaaaaaagacccgcaaaactcacacttttgcattggggaa

SEQ ID NO: 10879 - DNA, 20 bp, Human papillomavirus type 90
cacacttttgcattggggaa

SEQ ID NO: 10880 - DNA, 24 bp, Human papillomavirus type 90
taagtgtgcaggtgtgagtaactt

SEQ ID NO: 10881 - DNA, 19 bp, Homo sapiens
caactaagcacttggggaa

SEQ ID NO: 10882 - DNA, 20 bp, Homo sapiens
cacattatgctccttgggga

SEQ ID NO: 10883 - DNA, 18 bp, Homo sapiens
cacacctttgctctagaa

SEQ ID NO: 10884 - DNA, 19 bp, Homo sapiens
taactttgtatttggggaa

SEQ ID NO: 10885 - DNA, 19 bp, Homo sapiens
cacacttttccttctggaa

SEQ ID NO: 10886 - DNA, 18 bp, Homo sapiens
ctattagagattggggaa

SEQ ID NO: 10887 - DNA, 16 bp, Homo sapiens
acactctttgcaggga

SEQ ID NO: 10888 - DNA, 19 bp, Homo sapiens
cacacttctagtcgcggga

SEQ ID NO: 10889 - DNA, 17 bp, Homo sapiens
caccctttcctggggaa

SEQ ID NO: 10890 - DNA, 20 bp, Homo sapiens
cacacccccacagttgggga

SEQ ID NO: 10891 - DNA, 18 bp, Homo sapiens
cacattcatgctggggaa

SEQ ID NO: 10892 - DNA, 18 bp, Homo sapiens
cacactgggcctggggaa

SEQ ID NO: 10893 - DNA, 14 bp, Homo sapiens
acactttctgggga

SEQ ID NO: 10894 - DNA, 16 bp, Homo sapiens
acacctttttcgggaa

SEQ ID NO: 10895 - DNA, 19 bp, Homo sapiens
acatttttggcaccaggga

SEQ ID NO: 10896 - DNA, 16 bp, Homo sapiens
cacattttgcttagag

SEQ ID NO: 10897 - DNA, 15 bp, Homo sapiens
cacactttgctggaa

SEQ ID NO: 10898 - DNA, 20 bp, Homo sapiens
cactggagcccattggggaa

SEQ ID NO: 10899 - DNA, 19 bp, Homo sapiens
cacacatttgcttcaagga

SEQ ID NO: 10900 - DNA, 17 bp, Homo sapiens
cattttcccctggggaa

SEQ ID NO: 10901 - DNA, 19 bp, Homo sapiens
cacacctttgcacttctga

SEQ ID NO: 10902 - DNA, 19 bp, Homo sapiens
acacttttgtttaagggaa

SEQ ID NO: 10903 - DNA, 20 bp, Homo sapiens
cacactttgcagtccaggaa

SEQ ID NO: 10904 - DNA, 18 bp, Homo sapiens
catacttttaattgggaa

SEQ ID NO: 10905 - DNA, 18 bp, Homo sapiens
acacttttaggaaaggaa

SEQ ID NO: 10906 - DNA, 19 bp, Homo sapiens
cacagttttgtcattagaa

SEQ ID NO: 10907 - DNA, 19 bp, Homo sapiens
cagacctgatgttggggaa

SEQ ID NO: 10908 - DNA, 18 bp, Homo sapiens
cacacttttatttaagga

SEQ ID NO: 10909 - DNA, 19 bp, Homo sapiens
caccttttgcaaaacggag

SEQ ID NO: 10910 - DNA, 20 bp, Homo sapiens
cacatttattgcagttcggg

SEQ ID NO: 10911 - DNA, 19 bp, Homo sapiens
catttttgcattgtcagga

SEQ ID NO: 10912 - DNA, 20 bp, Homo sapiens
cacactttctctccagggaa

SEQ ID NO: 10913 - DNA, 20 bp, Homo sapiens
acagttgccctgttggggaa

SEQ ID NO: 10914 - DNA, 15 bp, Homo sapiens
acacttttaaaggga

SEQ ID NO: 10915 - DNA, 19 bp, Homo sapiens
cacactgtttgacttggga

SEQ ID NO: 10916 - DNA, 14 bp, Homo sapiens
cacactcctgggga

SEQ ID NO: 10917 - DNA, 20 bp, Homo sapiens
cacattttgcataataggga

SEQ ID NO: 10918 - DNA, 18 bp, Homo sapiens
cacttctgcaaggtgggg

SEQ ID NO: 10919 - DNA, 17 bp, Homo sapiens
cacactacattggggaa

SEQ ID NO: 10920 - DNA, 19 bp, Homo sapiens
acccttttgcatatatgaa

SEQ ID NO: 10921 - DNA, 20 bp, Homo sapiens
cacttttagtacagacgggg

SEQ ID NO: 10922 - DNA, 19 bp, Homo sapiens
cacacttctgtaaacagag

SEQ ID NO: 10923 - DNA, 19 bp, Homo sapiens
cacgcctggctctggggaa

SEQ ID NO: 10924 - DNA, 19 bp, Homo sapiens
cttattacatgttggggaa

SEQ ID NO: 10925 - DNA, 18 bp, Homo sapiens
cacattttgcatttttga

SEQ ID NO: 10926 - DNA, 16 bp, Homo sapiens
cacacttctccgggaa

SEQ ID NO: 10927 - DNA, 17 bp, Homo sapiens
cacactttgacaaggag

SEQ ID NO: 10928 - DNA, 18 bp, Homo sapiens
acattttgtccttgggga

SEQ ID NO: 10929 - DNA, 16 bp, Homo sapiens
catttcacctggggaa

SEQ ID NO: 10930 - DNA, 16 bp, Homo sapiens
cacactttggcaagag

SEQ ID NO: 10931 - DNA, 19 bp, Homo sapiens
caattgacagtttggggaa

SEQ ID NO: 10932 - DNA, 15 bp, Homo sapiens
cacactttcgtggga

SEQ ID NO: 10933 - DNA, 15 bp, Homo sapiens
caccctcttggggga

SEQ ID NO: 10934 - DNA, 17 bp, Homo sapiens
cattccctcttggggaa

SEQ ID NO: 10935 - DNA, 21 bp, Homo sapiens
cacatcttaaactttggggaa

SEQ ID NO: 10936 - DNA, 21 bp, Homo sapiens
cacactctttgcgcatctcag

SEQ ID NO: 10937 - DNA, 16 bp, Homo sapiens
cacgctttattgggaa

SEQ ID NO: 10938 - DNA, 18 bp, Homo sapiens
cacacctgaaatggggaa

SEQ ID NO: 10939 - DNA, 19 bp, Homo sapiens
cacaatatctgttggggaa

SEQ ID NO: 10940 - DNA, 18 bp, Homo sapiens
caccctgtaattggggaa

SEQ ID NO: 10941 - DNA, 20 bp, Homo sapiens
cacatttctgcatcttggga

SEQ ID NO: 10942 - DNA, 22 bp, Homo sapiens
acacttttccatctaatgggga

SEQ ID NO: 10943 - DNA, 18 bp, Homo sapiens
acattttaaacattgggg

SEQ ID NO: 10944 - DNA, 17 bp, Homo sapiens
cacacttctgtgtacag

SEQ ID NO: 10945 - DNA, 19 bp, Homo sapiens
acactgtgagcctggggaa

SEQ ID NO: 10946 - DNA, 18 bp, Homo sapiens
acactttatgcgtcgggg

SEQ ID NO: 10947 - DNA, 19 bp, Homo sapiens
cagacttttgctgcaggaa

SEQ ID NO: 10948 - DNA, 15 bp, Homo sapiens
cacatgccttgggga

SEQ ID NO: 10949 - DNA, 18 bp, Homo sapiens
ctcctgcgtgttggggaa

SEQ ID NO: 10950 - DNA, 17 bp, Homo sapiens
cacatttctgactggag

SEQ ID NO: 10951 - DNA, 19 bp, Homo sapiens
cacattcttgggcagggga

SEQ ID NO: 10952 - DNA, 18 bp, Homo sapiens
cacatatgaactggggaa

SEQ ID NO: 10953 - DNA, 18 bp, Homo sapiens
ttttgcatttccagggga

SEQ ID NO: 10954 - DNA, 17 bp, Homo sapiens
cacactttcaatgggaa

SEQ ID NO: 10955 - DNA, 18 bp, Homo sapiens
agtgtgtgtgtgtgtgta

SEQ ID NO: 10956 - DNA, 19 bp, Homo sapiens
taagtggcaggtgtgtggc

SEQ ID NO: 10957 - DNA, 17 bp, Homo sapiens
gtgtgcaagctgcataa

SEQ ID NO: 10958 - DNA, 77 bp, Human papillomavirus type 90
gtaaatatatgtaaactgtgtacagtgcggaacgttaagggacatctgttgtatacagtgtggagacctttatttgc

SEQ ID NO: 10959 - DNA, 24 bp, Human papillomavirus type 90
tacagtgtggagacctttatttgc

SEQ ID NO: 10960 - DNA, 24 bp, Human papillomavirus type 90
tgtaaactgtgtacagtgcggaac

SEQ ID NO: 10961 - DNA, 21 bp, Homo sapiens
acagaaattgacctttatttg

SEQ ID NO: 10962 - DNA, 21 bp, Homo sapiens
gtgtggagacctctctattgc

SEQ ID NO: 10963 - DNA, 21 bp, Homo sapiens
cactgagggatttttatttgc

SEQ ID NO: 10964 - DNA, 21 bp, Homo sapiens
cacagtgtgggggccgcctgc

SEQ ID NO: 10965 - DNA, 22 bp, Homo sapiens
tacagtgtggaattctggttgc

SEQ ID NO: 10966 - DNA, 17 bp, Homo sapiens
tacagtgtggaggctct

SEQ ID NO: 10967 - DNA, 20 bp, Homo sapiens
taagtgtggggattcatctg

SEQ ID NO: 10968 - DNA, 24 bp, Homo sapiens
tgtaaactgtgtggccaaaaggga

SEQ ID NO: 10969 - DNA, 24 bp, Homo sapiens
tgcaaactgagcttcagtgtggaa

SEQ ID NO: 10970 - DNA, 19 bp, Homo sapiens
tgtaactgtgtgtggcaaa

SEQ ID NO: 10971 - DNA, 20 bp, Homo sapiens
tggaaactgtgtggatggaa

SEQ ID NO: 10972 - DNA, 19 bp, Homo sapiens
tgtgagtgtgtgtgcagaa

SEQ ID NO: 10973 - DNA, 19 bp, Homo sapiens
tgtaaactgtgtacacaga

SEQ ID NO: 10974 - DNA, 18 bp, Homo sapiens
tgcagactgtgtagtggg

SEQ ID NO: 10975 - DNA, 17 bp, Homo sapiens
tgtaaaccccagtgtgg

SEQ ID NO: 10976 - DNA, 18 bp, Homo sapiens
tgtaactgtgtgctacgg

SEQ ID NO: 10977 - DNA, 21 bp, Homo sapiens
tattaacagtgcagtgtggaa

SEQ ID NO: 10978 - DNA, 20 bp, Homo sapiens
tgtaactgtgtatggcaaaa

SEQ ID NO: 10979 - DNA, 20 bp, Homo sapiens
tgtgagttgtgtacactgac

SEQ ID NO: 10980 - DNA, 17 bp, Homo sapiens
tgtaaatgtgtacagca

SEQ ID NO: 10981 - DNA, 22 bp, Homo sapiens
tgtaaactggtgtgtgttcagc

SEQ ID NO: 10982 - DNA, 19 bp, Homo sapiens
tgtaactgtgtgacgtggg

SEQ ID NO: 10983 - DNA, 18 bp, Homo sapiens
tgcaagaacagtgcggaa

SEQ ID NO: 10984 - DNA, 19 bp, Homo sapiens
tgtgaactgtgtccttgga

SEQ ID NO: 10985 - DNA, 21 bp, Homo sapiens
tgcgaattatatagtgcggaa

SEQ ID NO: 10986 - DNA, 68 bp, Human papillomavirus type 90
gcggccgtcgagatgacgctcgcacttgaggcgacacaggcaccagagcggcaggtcgatgacgctgc

SEQ ID NO: 10987 - DNA, 24 bp, Human papillomavirus type 90
ccagagcggcaggtcgatgacgct

SEQ ID NO: 10988 - DNA, 24 bp, Human papillomavirus type 90
gatgacgctcgcacttgaggcgac

SEQ ID NO: 10989 - DNA, 24 bp, Homo sapiens
cagagcggctgggcggttggcgct

SEQ ID NO: 10990 - DNA, 20 bp, Homo sapiens
cagggcggcaggtcatagct

SEQ ID NO: 10991 - DNA, 19 bp, Homo sapiens
gatgacgcgtacaggggcg

SEQ ID NO: 10992 - DNA, 71 bp, Human papillomavirus type 90
taccttacccattgtacctatatgtattgtatacacagtgtatgtagacacatgtagtgggtttgtgggtg

SEQ ID NO: 10993 - DNA, 24 bp, Human papillomavirus type 90
acccattgtacctatatgtattgt

SEQ ID NO: 10994 - DNA, 24 bp, Human papillomavirus type 90
tatgtagacacatgtagtgggttt

SEQ ID NO: 10995 - DNA, 19 bp, Homo sapiens
acccgtgtactgcttattg

SEQ ID NO: 10996 - DNA, 20 bp, Homo sapiens
acccatatgtacctttttgt

SEQ ID NO: 10997 - DNA, 18 bp, Homo sapiens
tgtccacatatgtattgt

SEQ ID NO: 10998 - DNA, 18 bp, Homo sapiens
tgtagatatatgtattgt

SEQ ID NO: 10999 - DNA, 19 bp, Homo sapiens
acccaattgtattcaatgt

SEQ ID NO: 11000 - DNA, 20 bp, Homo sapiens
taggcatgcctaatgggttt

SEQ ID NO: 11001 - DNA, 61 bp, Human papillomavirus type 90
ggagtatacgtaggctaggaagacaaagtaaggcttggtcatcaccagccgcttaaacacc

SEQ ID NO: 11002 - DNA, 24 bp, Human papillomavirus type 90
tatacgtaggctaggaagacaaag

SEQ ID NO: 11003 - DNA, 17 bp, Human papillomavirus type 90
ccagccgcttaaacacc

SEQ ID NO: 11004 - DNA, 23 bp, Homo sapiens
tatacatagggtcaaaggcaaag

SEQ ID NO: 11005 - DNA, 23 bp, Homo sapiens
tatacatattaccgaaggcaaag

SEQ ID NO: 11006 - DNA, 19 bp, Homo sapiens
ccacccttgtcagaacacc

SEQ ID NO: 11007 - DNA, 19 bp, Homo sapiens
ccagccgctcccaggcacc

SEQ ID NO: 11008 - DNA, 18 bp, Homo sapiens
ccagccacctggaaaaac

SEQ ID NO: 11009 - DNA, 18 bp, Homo sapiens
ccagccacctcgggcacc

SEQ ID NO: 11010 - DNA, 19 bp, Homo sapiens
ccagccgctgaatgacacc

SEQ ID NO: 11011 - DNA, 19 bp, Homo sapiens
ccagccgcttctccacacc

SEQ ID NO: 11012 - DNA, 18 bp, Homo sapiens
ccaaccgcctcggacgcc

SEQ ID NO: 11013 - DNA, 18 bp, Homo sapiens
ccaaccactgtaaatacc

SEQ ID NO: 11014 - DNA, 19 bp, Homo sapiens
ccagcagctcccaaacacc

SEQ ID NO: 11015 - DNA, 60 bp, Infectious spleen and kidney necrosis virus
ggcggtgggtctcgggccaaacgccgtcgtagacgacgcgctccgaaaaacgacgccgcc

SEQ ID NO: 11016 - DNA, 23 bp, Infectious spleen and kidney necrosis virus
gcgctccgaaaaacgacgccgcc

SEQ ID NO: 11017 - DNA, 24 bp, Infectious spleen and kidney necrosis virus
tctcgggccaaacgccgtcgtaga

SEQ ID NO: 11018 - DNA, 18 bp, Homo sapiens
gcgctccgaagcgacgcc

SEQ ID NO: 11019 - DNA, 22 bp, Homo sapiens
acgctccgggaagggcactgcc

SEQ ID NO: 11020 - DNA, 22 bp, Homo sapiens
gcgccccgggaccctcgccgcc

SEQ ID NO: 11021 - DNA, 15 bp, Homo sapiens
gctccgaaagaacca

SEQ ID NO: 11022 - DNA, 25 bp, Homo sapiens
gcgctccagcagctctggcgccgcc

SEQ ID NO: 11023 - DNA, 17 bp, Homo sapiens
gcgctccaagagctcgc

SEQ ID NO: 11024 - DNA, 17 bp, Homo sapiens
gcgctccgcgccgccgc

SEQ ID NO: 11025 - DNA, 16 bp, Homo sapiens
ctccgcggacgccgcc

SEQ ID NO: 11026 - DNA, 16 bp, Homo sapiens
cgctccgagccgccgc

SEQ ID NO: 11027 - DNA, 21 bp, Homo sapiens
gcgctccggcgccatggccgc

SEQ ID NO: 11028 - DNA, 25 bp, Homo sapiens
gcgctccgggaagccggggtgcgcc

SEQ ID NO: 11029 - DNA, 16 bp, Homo sapiens
cgctctgcgacgccgc

SEQ ID NO: 11030 - DNA, 22 bp, Homo sapiens
gcgctccgtgggcgcaggccgc

SEQ ID NO: 11031 - DNA, 16 bp, Homo sapiens
gcgtccgaaaatggcc

SEQ ID NO: 11032 - DNA, 15 bp, Homo sapiens
gcgcccacgacgccg

SEQ ID NO: 11033 - DNA, 19 bp, Homo sapiens
acgctccgacgggtgacgc

SEQ ID NO: 11034 - DNA, 18 bp, Homo sapiens
cgctccgagagacgcagc

SEQ ID NO: 11035 - DNA, 19 bp, Homo sapiens
gcgctccgcggaacgaacc

SEQ ID NO: 11036 - DNA, 18 bp, Homo sapiens
tctcgggcccgggcgcgc

SEQ ID NO: 11037 - DNA, 20 bp, Homo sapiens
tcttgggctaagtgccagtc

SEQ ID NO: 11038 - DNA, 18 bp, Homo sapiens
tctcaggccaagcgcgcc

SEQ ID NO: 11039 - DNA, 16 bp, Homo sapiens
tctcgggctgcagtgc

SEQ ID NO: 11040 - DNA, 20 bp, Homo sapiens
cctcgggccggacgtcatcg

SEQ ID NO: 11041 - DNA, 18 bp, Homo sapiens
tctcgggccgggcgcagt

SEQ ID NO: 11042 - DNA, 23 bp, Homo sapiens
cctcgggctgagcgacagcacgt

SEQ ID NO: 11043 - DNA, 21 bp, Homo sapiens
tcgggccaaagtgtcagcaga

SEQ ID NO: 11044 - DNA, 66 bp, Infectious spleen and kidney necrosis virus
gcacaccaggctcttggcccaccagagacactgtcacgtgtttgctgaacggccactctagtgtgt

SEQ ID NO: 11045 - DNA, 24 bp, Infectious spleen and kidney necrosis virus
tttgctgaacggccactctagtgt

SEQ ID NO: 11046 - DNA, 24 bp, Infectious spleen and kidney necrosis virus
gctcttggcccaccagagacactg

SEQ ID NO: 11047 - DNA, 21 bp, Homo sapiens
gctcttgtcccaccagtggac

SEQ ID NO: 11048 - DNA, 20 bp, Homo sapiens
ttggcccattgcagatgctg

SEQ ID NO: 11049 - DNA, 21 bp, Homo sapiens
tctgggcccacccagccactg

SEQ ID NO: 11050 - DNA, 25 bp, Homo sapiens
gctcttggtctctgaaatctcactg

SEQ ID NO: 11051 - DNA, 24 bp, Homo sapiens
gctcttggctcaccgcaacctctg

SEQ ID NO: 11052 - DNA, 20 bp, Homo sapiens
gcttttggcccattctgcca

SEQ ID NO: 11053 - DNA, 17 bp, Homo sapiens
gctcttggctcagcact

SEQ ID NO: 11054 - DNA, 101 bp, Infectious spleen and kidney necrosis virus
gcccgtaccactgccatcgccctttggatacatgcgcacacacatggcatacccattgcgatgtgtgtaaaacaccggagacagaaccatgggtagcgggc

SEQ ID NO: 11055 - DNA, 24 bp, Infectious spleen and kidney necrosis virus
cgatgtgtgtaaaacaccggagac

SEQ ID NO: 11056 - DNA, 24 bp, Infectious spleen and kidney necrosis virus
gccctttggatacatgcgcacaca

SEQ ID NO: 11057 - DNA, 18 bp, Homo sapiens
gagtgtgtaagggccaga

SEQ ID NO: 11058 - DNA, 18 bp, Homo sapiens
aatgtgtgtaaaatcagg

SEQ ID NO: 11059 - DNA, 19 bp, Homo sapiens
gatgtgtgcaaggtaccaa

SEQ ID NO: 11060 - DNA, 18 bp, Homo sapiens
tgtgtgtaaaattataga

SEQ ID NO: 11061 - DNA, 15 bp, Homo sapiens
gatgtgtgtaagaga

SEQ ID NO: 11062 - DNA, 22 bp, Homo sapiens
cgctgtggcttggacaccggag

SEQ ID NO: 11063 - DNA, 18 bp, Homo sapiens
tgtgtgtaggagcagaga

SEQ ID NO: 11064 - DNA, 21 bp, Homo sapiens
tgtgtttaaaacaccctagga

SEQ ID NO: 11065 - DNA, 20 bp, Homo sapiens
tgtgtgtaaatagctggaga

SEQ ID NO: 11066 - DNA, 21 bp, Homo sapiens
gatgtggtgggcccgggggac

SEQ ID NO: 11067 - DNA, 20 bp, Homo sapiens
gaaagtatgaaacactggag

SEQ ID NO: 11068 - DNA, 16 bp, Homo sapiens
atgtgtgtggcaggag

SEQ ID NO: 11069 - DNA, 14 bp, Homo sapiens
gatgtgtgtaggaa

SEQ ID NO: 11070 - DNA, 23 bp, Homo sapiens
tgtgcaaagtggatactggagac

SEQ ID NO: 11071 - DNA, 18 bp, Homo sapiens
gcctggcatgtgcgcaca

SEQ ID NO: 11072 - DNA, 18 bp, Homo sapiens
gccttttggatacacaca

SEQ ID NO: 11073 - DNA, 23 bp, Homo sapiens
gcttgttggatacatcaactaca

SEQ ID NO: 11074 - DNA, 19 bp, Homo sapiens
gccctttgggaatggggca

SEQ ID NO: 11075 - DNA, 21 bp, Homo sapiens
gcatatctgtgtgtgcgcaca

SEQ ID NO: 11076 - DNA, 21 bp, Homo sapiens
cctttgtaacatgtgcacaca

SEQ ID NO: 11077 - DNA, 19 bp, Homo sapiens
cctctgctcatgcgcatac

SEQ ID NO: 11078 - DNA, 18 bp, Homo sapiens
gccctttggttgtacatg

SEQ ID NO: 11079 - DNA, 25 bp, Homo sapiens
gccctttgtgtatacttttcacaca

SEQ ID NO: 11080 - DNA, 23 bp, Homo sapiens
ccctctgggtgtgtgcgcacaca

SEQ ID NO: 11081 - DNA, 20 bp, Homo sapiens
gcataccaaatacatgtgca

SEQ ID NO: 11082 - DNA, 21 bp, Homo sapiens
gctttttagatacacattgca

SEQ ID NO: 11083 - DNA, 60 bp, Infectious spleen and kidney necrosis virus
ggtagcgggcagtccgacgacacggccaccagccagacaagggtgccattctgcgttgcc

SEQ ID NO: 11084 - DNA, 24 bp, Infectious spleen and kidney necrosis virus
agacaagggtgccattctgcgttg

SEQ ID NO: 11085 - DNA, 24 bp, Infectious spleen and kidney necrosis virus
gggcagtccgacgacacggccacc

SEQ ID NO: 11086 - DNA, 15 bp, Homo sapiens
gacaaggggcagcgt

SEQ ID NO: 11087 - DNA, 19 bp, Homo sapiens
agacaagggtttcatcatg

SEQ ID NO: 11088 - DNA, 16 bp, Homo sapiens
gggtgccagcaagttg

SEQ ID NO: 11089 - DNA, 19 bp, Homo sapiens
agcaagggccttctgcgtt

SEQ ID NO: 11090 - DNA, 16 bp, Homo sapiens
gggcagccggtgcccc

SEQ ID NO: 11091 - DNA, 21 bp, Homo sapiens
gggcagcctgatgtccccacc

SEQ ID NO: 11092 - DNA, 18 bp, Homo sapiens
gggcgtctgctcggccac

SEQ ID NO: 11093 - DNA, 22 bp, Homo sapiens
gggcagtcgatttccggttgcc

SEQ ID NO: 11094 - DNA, 19 bp, Homo sapiens
gggcagtccgagggtgcgg

SEQ ID NO: 11095 - DNA, 24 bp, Homo sapiens
gggcagtctgtggggacagtcacc

SEQ ID NO: 11096 - DNA, 19 bp, Homo sapiens
gggcagcccgcaggcggcc

SEQ ID NO: 11097 - DNA, 23 bp, Homo sapiens
gggcagtccgacggggcagggcc

SEQ ID NO: 11098 - DNA, 22 bp, Homo sapiens
gggtaattcaaacacggctacc

SEQ ID NO: 11099 - DNA, 18 bp, Homo sapiens
gggcagtccggctggcac

SEQ ID NO: 11100 - DNA, 22 bp, Homo sapiens
gggcagtcctggcggcagaacc

SEQ ID NO: 11101 - DNA, 21 bp, Homo sapiens
gggcaggccgcgccggccacc

SEQ ID NO: 11102 - DNA, 20 bp, Homo sapiens
gggcagtccggggtatggcc

SEQ ID NO: 11103 - DNA, 18 bp, Homo sapiens
aggcagtcctgcggccac

SEQ ID NO: 11104 - DNA, 16 bp, Homo sapiens
gggcaatccggtggca

SEQ ID NO: 11105 - DNA, 75 bp, Infectious spleen and kidney necrosis virus
tgcctgtctctccatgttaaggttgttgacgctggcttcaagagccttgatacgatctgtggccctcttcaggca

SEQ ID NO: 11106 - DNA, 24 bp, Infectious spleen and kidney necrosis virus
aagagccttgatacgatctgtggc

SEQ ID NO: 11107 - DNA, 24 bp, Infectious spleen and kidney necrosis virus
tccatgttaaggttgttgacgctg

SEQ ID NO: 11108 - DNA, 23 bp, Homo sapiens
aagggccattgtgcttctgtggc

SEQ ID NO: 11109 - DNA, 24 bp, Homo sapiens
aggcgtctgcagacggtctgtggc

SEQ ID NO: 11110 - DNA, 24 bp, Homo sapiens
aagagccttgatgtcaagaagagc

SEQ ID NO: 11111 - DNA, 23 bp, Homo sapiens
aagagtctgtgacatctttgtgg

SEQ ID NO: 11112 - DNA, 24 bp, Homo sapiens
aagaatccgaagatgatctgtggc

SEQ ID NO: 11113 - DNA, 21 bp, Homo sapiens
aacagtactgatgatctgtgg

SEQ ID NO: 11114 - DNA, 22 bp, Homo sapiens
aagtgccttccaggatctgtgg

SEQ ID NO: 11115 - DNA, 15 bp, Homo sapiens
tccatgagttgttga

SEQ ID NO: 11116 - DNA, 21 bp, Homo sapiens
tccatgctggggccagcgctg

SEQ ID NO: 11117 - DNA, 19 bp, Homo sapiens
cagttaaggttttccgttg

SEQ ID NO: 11118 - DNA, 100 bp, Infectious spleen and kidney necrosis virus
cggcagttacctgttgtatcgcaaggctcacgtggagctgtcactctccagcaacaaggtgcaacacgtggaagccgtgctgcgacaggtgtacacgccg

SEQ ID NO: 11119 - DNA, 24 bp, Infectious spleen and kidney necrosis virus
tacctgttgtatcgcaaggctcac

SEQ ID NO: 11120 - DNA, 24 bp, Infectious spleen and kidney necrosis virus
tgcaacacgtggaagccgtgctgc

SEQ ID NO: 11121 - DNA, 20 bp, Homo sapiens
ctgtgtgtctgtaaggctca

SEQ ID NO: 11122 - DNA, 20 bp, Homo sapiens
tacctgttgtggtgccatca

SEQ ID NO: 11123 - DNA, 17 bp, Homo sapiens
cctgttgtgccctactc

SEQ ID NO: 11124 - DNA, 16 bp, Homo sapiens
tgcaggcggccgtgct

SEQ ID NO: 11125 - DNA, 20 bp, Homo sapiens
acaggccacaggccgtgctg

SEQ ID NO: 11126 - DNA, 26 bp, Homo sapiens
tgcacatgaatggaaggctgtgctgc

SEQ ID NO: 11127 - DNA, 73 bp, Equine rhinovirus 3
gccacacgtccaactgcttcccgaacgtctcgttatatagtgcgacggacaaaaccagttcccggacgtgggc

SEQ ID NO: 11128 - DNA, 24 bp, Equine rhinovirus 3
acggacaaaaccagttcccggacg

SEQ ID NO: 11129 - DNA, 24 bp, Equine rhinovirus 3
tccaactgcttcccgaacgtctcg

SEQ ID NO: 11130 - DNA, 17 bp, Homo sapiens
cggacaaagcctgcggc

SEQ ID NO: 11131 - DNA, 22 bp, Homo sapiens
gatgaaaccctcgtcccggacg

SEQ ID NO: 11132 - DNA, 24 bp, Homo sapiens
cagacaaaatcacaaccctctgga

SEQ ID NO: 11133 - DNA, 16 bp, Homo sapiens
ggggaaaccagtcaga

SEQ ID NO: 11134 - DNA, 16 bp, Homo sapiens
cgggcaaaaccaggga

SEQ ID NO: 11135 - DNA, 19 bp, Homo sapiens
ggcagccagctgttcccgg

SEQ ID NO: 11136 - DNA, 18 bp, Homo sapiens
tccaactgttctaactct

SEQ ID NO: 11137 - DNA, 23 bp, Homo sapiens
aactacttccttttgcgagacgt

SEQ ID NO: 11138 - DNA, 19 bp, Homo sapiens
cagctgcttcctttgctcg

SEQ ID NO: 11139 - DNA, 22 bp, Homo sapiens
tccagctgcttcctcgttctcg

SEQ ID NO: 11140 - DNA, 24 bp, Homo sapiens
tccaactgcctttcccgccctttc

SEQ ID NO: 11141 - DNA, 98 bp, Equine rhinovirus 3
gtttgagtgtggtagcgctgtgtgagttggcggtggaaccccctcgtggtgacacgagcccccgtggccaaaagcccagtgtttacagcacctctcac

SEQ ID NO: 11142 - DNA, 24 bp, Equine rhinovirus 3
tgagtgtggtagcgctgtgtgagt

SEQ ID NO: 11143 - DNA, 24 bp, Equine rhinovirus 3
cccccgtggccaaaagcccagtgt

SEQ ID NO: 11144 - DNA, 21 bp, Homo sapiens
tgagtgtgtgtgagtgtgagt

SEQ ID NO: 11145 - DNA, 25 bp, Homo sapiens
tgagtgtgtgtgagtgtgtgtgagt

SEQ ID NO: 11146 - DNA, 17 bp, Homo sapiens
gaggaggtgctgtgtgg

SEQ ID NO: 11147 - DNA, 19 bp, Homo sapiens
tgggtgtggtggtgcctgt

SEQ ID NO: 11148 - DNA, 17 bp, Homo sapiens
tgactgtgactgtgtgg

SEQ ID NO: 11149 - DNA, 17 bp, Homo sapiens
gcgtgtgcctgtgtgag

SEQ ID NO: 11150 - DNA, 23 bp, Homo sapiens
tgggtgtggtagtgcgcacttgt

SEQ ID NO: 11151 - DNA, 22 bp, Homo sapiens
cctggttctagaagcccagtgt

SEQ ID NO: 11152 - DNA, 18 bp, Homo sapiens
cctttggccaaaagtgcc

SEQ ID NO: 11153 - DNA, 21 bp, Homo sapiens
cctcttggccaaaagacttgt

SEQ ID NO: 11154 - DNA, 21 bp, Homo sapiens
ccttggaccggagcccagtgt

SEQ ID NO: 11155 - DNA, 18 bp, Homo sapiens
cctccgtgctcagaagcc

SEQ ID NO: 11156 - DNA, 24 bp, Homo sapiens
cccttgggaatgtgagcccagtgt

SEQ ID NO: 11157 - DNA, 23 bp, Homo sapiens
ccctgggtgatgaagcccagtgt

SEQ ID NO: 11158 - DNA, 16 bp, Homo sapiens
cctctggcagcccagc

SEQ ID NO: 11159 - DNA, 112 bp, Equine rhinovirus 3
aagaagattactcttgatgcttggctctcagaaagaatggcacctcaaagttttgagacccgattcttttgagtcgagaaccttacccccaacccttgagattgcttttctt

SEQ ID NO: 11160 - DNA, 24 bp, Equine rhinovirus 3
agacccgattcttttgagtcgaga

SEQ ID NO: 11161 - DNA, 24 bp, Equine rhinovirus 3
agaaagaatggcacctcaaagttt

SEQ ID NO: 11162 - DNA, 20 bp, Homo sapiens
gattttgcagtgagtcgaga

SEQ ID NO: 11163 - DNA, 16 bp, Homo sapiens
agaaaggctcaaagtt

SEQ ID NO: 11164 - DNA, 25 bp, Homo sapiens
agaagaaatggcaaagagaaagttt

SEQ ID NO: 11165 - DNA, 18 bp, Homo sapiens
aaaaagaatggtacctca

SEQ ID NO: 11166 - DNA, 24 bp, Homo sapiens
agagagagctgggtttcaaagttt

SEQ ID NO: 11167 - DNA, 21 bp, Homo sapiens
agaaagaggtcaacaaagttt

SEQ ID NO: 11168 - DNA, 27 bp, Homo sapiens
agaaagaattgcaatttaccaaggttt

SEQ ID NO: 11169 - DNA, 22 bp, Homo sapiens
aagatgaatcacctcaaggttt

SEQ ID NO: 11170 - DNA, 130 bp, Equine rhinovirus 3
cgggaggaccgccgacgccgtgtccggaagcctcgtcggagcagagggccaggtgtttatatagcagcagatagagatccttggaccgaaaccttcgacccgcgtaccgtagcaggagcggcgcctcccg

SEQ ID NO: 11171 - DNA, 24 bp, Equine rhinovirus 3
taccgtagcaggagcggcgcctcc

SEQ ID NO: 11172 - DNA, 24 bp, Equine rhinovirus 3
acgccgtgtccggaagcctcgtcg

SEQ ID NO: 11173 - DNA, 19 bp, Homo sapiens
tactgtagcaggaagtcct

SEQ ID NO: 11174 - DNA, 21 bp, Homo sapiens
gcagccatgggtggcgcctcc

SEQ ID NO: 11175 - DNA, 22 bp, Homo sapiens
ccgagtacaagccggcgcctcc

SEQ ID NO: 11176 - DNA, 17 bp, Homo sapiens
gccgtgtccggcttcgt

SEQ ID NO: 11177 - DNA, 19 bp, Homo sapiens
gcgtctgtccggaggctcg

SEQ ID NO: 11178 - DNA, 92 bp, Equine rhinovirus 3
tcgctgaacaaattgtatcctctcagggcctcctccgcgtcgttgatgtaggcacaggaccccgctgaggaagacgcgaggttctttagcga

SEQ ID NO: 11179 - DNA, 24 bp, Equine rhinovirus 3
caggaccccgctgaggaagacgcg

SEQ ID NO: 11180 - DNA, 24 bp, Equine rhinovirus 3
tctcagggcctcctccgcgtcgtt

SEQ ID NO: 11181 - DNA, 19 bp, Homo sapiens
aggagcttgctgaggaaaa

SEQ ID NO: 11182 - DNA, 19 bp, Homo sapiens
ggacttcagagaaggaaga

SEQ ID NO: 11183 - DNA, 22 bp, Homo sapiens
ggaccccgctcggggagaggcg

SEQ ID NO: 11184 - DNA, 19 bp, Homo sapiens
cctctcgctgaggagggcg

SEQ ID NO: 11185 - DNA, 19 bp, Homo sapiens
gacccggaaggaagacgcg

SEQ ID NO: 11186 - DNA, 19 bp, Homo sapiens
ggacccatggccaagggcg

SEQ ID NO: 11187 - DNA, 18 bp, Homo sapiens
ggaccccagtgggaggcg

SEQ ID NO: 11188 - DNA, 19 bp, Homo sapiens
ggctccgccgagagccgcg

SEQ ID NO: 11189 - DNA, 19 bp, Homo sapiens
caggaccccggtgcgttga

SEQ ID NO: 11190 - DNA, 16 bp, Homo sapiens
cagaggctgagggaga

SEQ ID NO: 11191 - DNA, 27 bp, Homo sapiens
caggtctccgctgaatgggcggacgcg

SEQ ID NO: 11192 - DNA, 19 bp, Homo sapiens
tctcagggtcctctccagt

SEQ ID NO: 11193 - DNA, 19 bp, Homo sapiens
tctcagggcctccctacgt

SEQ ID NO: 11194 - DNA, 19 bp, Homo sapiens
tctcaggggcttctctggc

SEQ ID NO: 11195 - DNA, 20 bp, Homo sapiens
tctcagggccttttcacgca

SEQ ID NO: 11196 - DNA, 66 bp, Equine rhinovirus 3
gcgaggcacgtctcacggtgtttttcaccccgagctttaatatatatagaaacacgtttatttcgc

SEQ ID NO: 11197 - DNA, 24 bp, Equine rhinovirus 3
cccgagctttaatatatatagaaa

SEQ ID NO: 11198 - DNA, 24 bp, Equine rhinovirus 3
aggcacgtctcacggtgtttttca

SEQ ID NO: 11199 - DNA, 19 bp, Homo sapiens
cccgagtttaattacagaa

SEQ ID NO: 11200 - DNA, 20 bp, Homo sapiens
agcttcaagatatatagaaa

SEQ ID NO: 11201 - DNA, 22 bp, Homo sapiens
cccagctttaatatctaccaga

SEQ ID NO: 11202 - DNA, 19 bp, Homo sapiens
ggtgcgtgactgtgttttt

SEQ ID NO: 11203 - DNA, 23 bp, Homo sapiens
agtcacgtcttcaacaatttttt

SEQ ID NO: 11204 - DNA, 20 bp, Homo sapiens
ggcacgtggaatgtttttca

SEQ ID NO: 11205 - DNA, 17 bp, Homo sapiens
aggccatgtgtgttttt

SEQ ID NO: 11206 - DNA, 18 bp, Homo sapiens
aggcacgtcattgttccc

SEQ ID NO: 11207 - DNA, 19 bp, Homo sapiens
aggctgtctcccatttttc

SEQ ID NO: 11208 - DNA, 25 bp, Homo sapiens
aggcacattttgcacctgtttttca

SEQ ID NO: 11209 - DNA, 16 bp, Homo sapiens
ggtgcgtcgtgctctt

SEQ ID NO: 11210 - DNA, 21 bp, Homo sapiens
ggtgtatctggatgtttttca

SEQ ID NO: 11211 - DNA, 19 bp, Homo sapiens
aggcacattttgttttttc

SEQ ID NO: 11212 - DNA, 19 bp, Homo sapiens
agcatgtctcacagttttc

SEQ ID NO: 11213 - DNA, 80 bp, Fowl adenovirus D
agtggaatgttctaccacaaggatgggtatgtagccctgccatttatcagactaccacccagaagattatagaaaacatt

SEQ ID NO: 11214 - DNA, 24 bp, Fowl adenovirus D
ccacccagaagattatagaaaaca

SEQ ID NO: 11215 - DNA, 24 bp, Fowl adenovirus D
tctaccacaaggatgggtatgtag

SEQ ID NO: 11216 - DNA, 17 bp, Homo sapiens
ccagtccagaagacaga

SEQ ID NO: 11217 - DNA, 18 bp, Homo sapiens
ccagaagaattaaaaaca

SEQ ID NO: 11218 - DNA, 17 bp, Homo sapiens
cacccagagaaaaaaac

SEQ ID NO: 11219 - DNA, 20 bp, Homo sapiens
ccacccaaaagaaaagaaaa

SEQ ID NO: 11220 - DNA, 19 bp, Homo sapiens
ccacccagaggaatcccag

SEQ ID NO: 11221 - DNA, 18 bp, Homo sapiens
cccaggagggcacaaaaa

SEQ ID NO: 11222 - DNA, 21 bp, Homo sapiens
ccatctgaagatcatcaaaaa

SEQ ID NO: 11223 - DNA, 22 bp, Homo sapiens
ccacccagaaaaacaggagaca

SEQ ID NO: 11224 - DNA, 21 bp, Homo sapiens
cacctgagagtgcagaaaaca

SEQ ID NO: 11225 - DNA, 20 bp, Homo sapiens
cccaacctattgtagaaaac

SEQ ID NO: 11226 - DNA, 24 bp, Homo sapiens
ccactgggggactgacagaaaaca

SEQ ID NO: 11227 - DNA, 18 bp, Homo sapiens
ccagatttttatagaaaa

SEQ ID NO: 11228 - DNA, 19 bp, Homo sapiens
ccaccagaaaataagaaaa

SEQ ID NO: 11229 - DNA, 18 bp, Homo sapiens
ccagaagatctaaaaaca

SEQ ID NO: 11230 - DNA, 15 bp, Homo sapiens
cacccaaaaaggaaa

SEQ ID NO: 11231 - DNA, 20 bp, Homo sapiens
catccagaagaaaaccaaga

SEQ ID NO: 11232 - DNA, 17 bp, Homo sapiens
caccagaagatagaaaa

SEQ ID NO: 11233 - DNA, 17 bp, Homo sapiens
cagaagttaagaaaaca

SEQ ID NO: 11234 - DNA, 18 bp, Homo sapiens
cctccagaagattctaag

SEQ ID NO: 11235 - DNA, 15 bp, Homo sapiens
cacccaaaaagagaa

SEQ ID NO: 11236 - DNA, 17 bp, Homo sapiens
ccacccagagggcacag

SEQ ID NO: 11237 - DNA, 16 bp, Homo sapiens
ccacccaggagacaga

SEQ ID NO: 11238 - DNA, 21 bp, Homo sapiens
gaagattacaccaagaaaaca

SEQ ID NO: 11239 - DNA, 18 bp, Homo sapiens
ccacccaggaggagacag

SEQ ID NO: 11240 - DNA, 16 bp, Homo sapiens
ccaccaggaaagaaaa

SEQ ID NO: 11241 - DNA, 18 bp, Homo sapiens
cccccagaagggcataga

SEQ ID NO: 11242 - DNA, 19 bp, Homo sapiens
ccacccaaagccatgaaaa

SEQ ID NO: 11243 - DNA, 17 bp, Homo sapiens
ccagccagaagactcag

SEQ ID NO: 11244 - DNA, 18 bp, Homo sapiens
ccaggagaactatagaaa

SEQ ID NO: 11245 - DNA, 23 bp, Homo sapiens
cctcccagaactgggatggaaaa

SEQ ID NO: 11246 - DNA, 22 bp, Homo sapiens
cacccagagcataggaaaaaca

SEQ ID NO: 11247 - DNA, 22 bp, Homo sapiens
cccattaacattatagaaaaca

SEQ ID NO: 11248 - DNA, 17 bp, Homo sapiens
ccagagaaaagaaaaca

SEQ ID NO: 11249 - DNA, 17 bp, Homo sapiens
taacccagaagtgagaa

SEQ ID NO: 11250 - DNA, 17 bp, Homo sapiens
cacccagaaagaaagaa

SEQ ID NO: 11251 - DNA, 18 bp, Homo sapiens
cagaagacacagaagaca

SEQ ID NO: 11252 - DNA, 19 bp, Homo sapiens
cccttcagaagatttgtag

SEQ ID NO: 11253 - DNA, 18 bp, Homo sapiens
ccacccaagaagaaaata

SEQ ID NO: 11254 - DNA, 19 bp, Homo sapiens
cagaatttgttagaaaaca

SEQ ID NO: 11255 - DNA, 17 bp, Homo sapiens
cacagaaatgtatgtag

SEQ ID NO: 11256 - DNA, 18 bp, Homo sapiens
tctccacaaggatacgta

SEQ ID NO: 11257 - DNA, 16 bp, Homo sapiens
tacctactgggtatgt

SEQ ID NO: 11258 - DNA, 69 bp, Fowl adenovirus D
ctgcagcagtatattggtgtgaaggaaggactaagtcaaaggtatttccaggaaccaatcaacaggcgg

SEQ ID NO: 11259 - DNA, 24 bp, Fowl adenovirus D
tttccaggaaccaatcaacaggcg

SEQ ID NO: 11260 - DNA, 24 bp, Fowl adenovirus D
cagcagtatattggtgtgaaggaa

SEQ ID NO: 11261 - DNA, 16 bp, Homo sapiens
cttccaggaggacagg

SEQ ID NO: 11262 - DNA, 15 bp, Homo sapiens
tccccaatcaacagg

SEQ ID NO: 11263 - DNA, 22 bp, Homo sapiens
tttctgggaaccaagtttcaag

SEQ ID NO: 11264 - DNA, 18 bp, Homo sapiens
tttccaggaattaaacag

SEQ ID NO: 11265 - DNA, 18 bp, Homo sapiens
ttcccaggagccagaagc

SEQ ID NO: 11266 - DNA, 22 bp, Homo sapiens
cagcagtagttgtccctgagga

SEQ ID NO: 11267 - DNA, 17 bp, Homo sapiens
acagtgtacttgaagga

SEQ ID NO: 11268 - DNA, 16 bp, Homo sapiens
agttatggtgtgaagg

SEQ ID NO: 11269 - DNA, 21 bp, Homo sapiens
cagcagtgtgattggatggaa

SEQ ID NO: 11270 - DNA, 18 bp, Homo sapiens
agcattatataagaagga

SEQ ID NO: 11271 - DNA, 21 bp, Homo sapiens
cagcgtgttactgtggaggaa

SEQ ID NO: 11272 - DNA, 18 bp, Homo sapiens
cagcatgactgtgaagga

SEQ ID NO: 11273 - DNA, 17 bp, Homo sapiens
gtagatgaaatgaagga

SEQ ID NO: 11274 - DNA, 18 bp, Homo sapiens
gccagtgtggagtgaggg

SEQ ID NO: 11275 - DNA, 18 bp, Homo sapiens
cagcgctggtgtggagga

SEQ ID NO: 11276 - DNA, 21 bp, Homo sapiens
cagggtagggaggtgtggagg

SEQ ID NO: 11277 - DNA, 24 bp, Homo sapiens
cagcggtgaagaatcgtgggggaa

SEQ ID NO: 11278 - DNA, 19 bp, Homo sapiens
gcaggggtggtgtgaggga

SEQ ID NO: 11279 - DNA, 16 bp, Homo sapiens
cagcagtatgtaaaag

SEQ ID NO: 11280 - DNA, 120 bp, Fowl adenovirus D
tctatgcatatgcatgagagattcatgcatatgaatgagagtctcatccatattcataaacctcatccatattcatgagcctctcatgcatatgcatgtttttacatgcatatgcatgga

SEQ ID NO: 11281 - DNA, 24 bp, Fowl adenovirus D
ttcatgagcctctcatgcatatgc

SEQ ID NO: 11282 - DNA, 24 bp, Fowl adenovirus D
tgaatgagagtctcatccatattc

SEQ ID NO: 11283 - DNA, 19 bp, Homo sapiens
ttcatgatatgtgcatatg

SEQ ID NO: 11284 - DNA, 25 bp, Homo sapiens
atgagcctttgttgtggtgcatgtg

SEQ ID NO: 11285 - DNA, 18 bp, Homo sapiens
ttcatgagtttgtcatgc

SEQ ID NO: 11286 - DNA, 17 bp, Homo sapiens
tcatgaccatgcatgtg

SEQ ID NO: 11287 - DNA, 20 bp, Homo sapiens
tcgtgagtttattgcatatg

SEQ ID NO: 11288 - DNA, 23 bp, Homo sapiens
tggatgagaatgagcaccatatt

SEQ ID NO: 11289 - DNA, 22 bp, Homo sapiens
gaatgagaggagccctatattc

SEQ ID NO: 11290 - DNA, 21 bp, Homo sapiens
tgaatgacagacaccatattc

SEQ ID NO: 11291 - DNA, 22 bp, Homo sapiens
tgaagtccactcatccatgttc

SEQ ID NO: 11292 - DNA, 19 bp, Homo sapiens
aaatgaggaaatccatatt

SEQ ID NO: 11293 - DNA, 20 bp, Homo sapiens
tgaatgagagtgtttatctc

SEQ ID NO: 11294 - DNA, 60 bp, Fowl adenovirus D
acttacatagtgacaacgggccgtgctttactgcacacaggatagaaaatctatgtaagt

SEQ ID NO: 11295 - DNA, 24 bp, Fowl adenovirus D
tacatagtgacaacgggccgtgct

SEQ ID NO: 11296 - DNA, 18 bp, Fowl adenovirus D
tagaaaatctatgtaagt

SEQ ID NO: 11297 - DNA, 22 bp, Homo sapiens
tacgtattgacaacatggatgt

SEQ ID NO: 11298 - DNA, 16 bp, Homo sapiens
cacgtagtgacagctg

SEQ ID NO: 11299 - DNA, 28 bp, Homo sapiens
catagtaacaacatttgttagcacggcc

SEQ ID NO: 11300 - DNA, 20 bp, Homo sapiens
acagtgacacaaatgttgtg

SEQ ID NO: 11301 - DNA, 18 bp, Homo sapiens
taatagtgacgatggtgc

SEQ ID NO: 11302 - DNA, 63 bp, Cowpox virus
cattcggataggttaatggttgggtcgcgcagaccggataaagcctgcaacgtattctgagtg

SEQ ID NO: 11303 - DNA, 24 bp, Cowpox virus
taggttaatggttgggtcgcgcag

SEQ ID NO: 11304 - DNA, 24 bp, Cowpox virus
taaagcctgcaacgtattctgagt

SEQ ID NO: 11305 - DNA, 16 bp, Homo sapiens
gggtgggtgggcgcgc

SEQ ID NO: 11306 - DNA, 22 bp, Homo sapiens
taagcgaggttgggttgtgcag

SEQ ID NO: 11307 - DNA, 21 bp, Homo sapiens
taaagcctgctgctcctgggt

SEQ ID NO: 11308 - DNA, 18 bp, Homo sapiens
tgaggttgcaactctgag

SEQ ID NO: 11309 - DNA, 19 bp, Homo sapiens
gcccaaatgtgttctgagt

SEQ ID NO: 11310 - DNA, 16 bp, Homo sapiens
ctgcgatgtcctgagt

SEQ ID NO: 11311 - DNA, 119 bp, Cowpox virus
caactgcgtttcaatgcattgaatcttctttacgtagtcgtctcgttctttctcaaggttagaaattgtatcgaactgctcgttgatctggttcgtcaggcatttgaacacggtatttg

SEQ ID NO: 11312 - DNA, 24 bp, Cowpox virus
tcaatgcattgaatcttctttacg

SEQ ID NO: 11313 - DNA, 24 bp, Cowpox virus
ttcgtcaggcatttgaacacggta

SEQ ID NO: 11314 - DNA, 16 bp, Homo sapiens
tcaacgcatttcttta

SEQ ID NO: 11315 - DNA, 19 bp, Homo sapiens
ttcttgggcatttgggggt

SEQ ID NO: 11316 - DNA, 67 bp, Cowpox virus
tcctcaacaacgtctgttatgccgctcactgttttgttctccgcgagctttatcagcaagtttagga

SEQ ID NO: 11317 - DNA, 24 bp, Cowpox virus
tccgcgagctttatcagcaagttt

SEQ ID NO: 11318 - DNA, 24 bp, Cowpox virus
aacgtctgttatgccgctcactgt

SEQ ID NO: 11319 - DNA, 21 bp, Homo sapiens
cgcagctttatcattctgttt

SEQ ID NO: 11320 - DNA, 64 bp, Cowpox virus
gcacgtgctaccgaccagcgcttttagaggcgcggtatttagtaactgacataactttgcgtgc

SEQ ID NO: 11321 - DNA, 24 bp, Cowpox virus
tatttagtaactgacataactttg

SEQ ID NO: 11322 - DNA, 24 bp, Cowpox virus
acgtgctaccgaccagcgctttta

SEQ ID NO: 11323 - DNA, 17 bp, Homo sapiens
gtaattgcacaactttg

SEQ ID NO: 11324 - DNA, 22 bp, Homo sapiens
tacttagtaggcaataactttg

SEQ ID NO: 11325 - DNA, 22 bp, Homo sapiens
acatgctagtcaggtgctttta

SEQ ID NO: 11326 - DNA, 65 bp, Cowpox virus
gcaccgcaagccacgtacattgtacctcaaaagaggaatatgacgaatggccgagatgctggtgc

SEQ ID NO: 11327 - DNA, 24 bp, Cowpox virus
gccacgtacattgtacctcaaaag

SEQ ID NO: 11328 - DNA, 18 bp, Cowpox virus
tggccgagatgctggtgc

SEQ ID NO: 11329 - DNA, 18 bp, Homo sapiens
gccatgtgtattgcaccc

SEQ ID NO: 11330 - DNA, 24 bp, Homo sapiens
gccgttgtcactgagcctcaaaag

SEQ ID NO: 11331 - DNA, 18 bp, Homo sapiens
gctgcatacattgtgtca

SEQ ID NO: 11332 - DNA, 22 bp, Homo sapiens
acatacttttgtaccttgaaag

SEQ ID NO: 11333 - DNA, 22 bp, Homo sapiens
gccatgatgacagcctcaaaag

SEQ ID NO: 11334 - DNA, 18 bp, Homo sapiens
ggccgagacggtgggtgc

SEQ ID NO: 11335 - DNA, 18 bp, Homo sapiens
ggccggctgcgctggtgc

SEQ ID NO: 11336 - DNA, 16 bp, Homo sapiens
tggccgaggctcatgc

SEQ ID NO: 11337 - DNA, 19 bp, Homo sapiens
tggctggatgctgacgtgc

SEQ ID NO: 11338 - DNA, 17 bp, Homo sapiens
tggccagaggctgatgc

SEQ ID NO: 11339 - DNA, 18 bp, Homo sapiens
tggccgtgtgaccggtgc

SEQ ID NO: 11340 - DNA, 19 bp, Homo sapiens
tggtggagataccacgtgc

SEQ ID NO: 11341 - DNA, 18 bp, Homo sapiens
tgtccggcgagctggtgc

SEQ ID NO: 11342 - DNA, 18 bp, Homo sapiens
tagctgagggtgatggtg

SEQ ID NO: 11343 - DNA, 18 bp, Homo sapiens
tgactcagcggctggtgc

SEQ ID NO: 11344 - DNA, 17 bp, Homo sapiens
tggccgagtgcctgtgc

SEQ ID NO: 11345 - DNA, 15 bp, Homo sapiens
tggccgaggctgggc

SEQ ID NO: 11346 - DNA, 18 bp, Homo sapiens
tggcacgagaaccactgc

SEQ ID NO: 11347 - DNA, 17 bp, Homo sapiens
tgaccgagataggacgc

SEQ ID NO: 11348 - DNA, 16 bp, Homo sapiens
tggcatgagctggtgc

SEQ ID NO: 11349 - DNA, 17 bp, Homo sapiens
tgaccgaggtgaggtgc

SEQ ID NO: 11350 - DNA, 18 bp, Homo sapiens
ggtccaggctgctggtgc

SEQ ID NO: 11351 - DNA, 16 bp, Homo sapiens
tgaccgacctgggtgc

SEQ ID NO: 11352 - DNA, 15 bp, Homo sapiens
tggccgagccggtgc

SEQ ID NO: 11353 - DNA, 18 bp, Homo sapiens
tggctgcgatgctgatgc

SEQ ID NO: 11354 - DNA, 18 bp, Homo sapiens
tggccgagggcatcgtgc

SEQ ID NO: 11355 - DNA, 17 bp, Homo sapiens
tggcctggagccggtgc

SEQ ID NO: 11356 - DNA, 16 bp, Homo sapiens
tagccgaggcgaatgc

SEQ ID NO: 11357 - DNA, 18 bp, Homo sapiens
tagccgagaaggaagtgc

SEQ ID NO: 11358 - DNA, 19 bp, Homo sapiens
tggcctgaggtcacacagc

SEQ ID NO: 11359 - DNA, 17 bp, Homo sapiens
tggccgagtgaccaggc

SEQ ID NO: 11360 - DNA, 16 bp, Homo sapiens
tggccggcacaggtgc

SEQ ID NO: 11361 - DNA, 16 bp, Homo sapiens
tggccgagtgccttgc

SEQ ID NO: 11362 - DNA, 15 bp, Homo sapiens
tggccgggccgatgc

SEQ ID NO: 11363 - DNA, 16 bp, Homo sapiens
tggccgagggacatgc

SEQ ID NO: 11364 - DNA, 15 bp, Homo sapiens
tggaagtgctggtgc

SEQ ID NO: 11365 - DNA, 17 bp, Homo sapiens
tggtgcagaactggtgc

SEQ ID NO: 11366 - DNA, 15 bp, Homo sapiens
tggccgagctagggc

SEQ ID NO: 11367 - DNA, 14 bp, Homo sapiens
tggccggctggtgc

SEQ ID NO: 11368 - DNA, 15 bp, Homo sapiens
tggcagagattgggc

SEQ ID NO: 11369 - DNA, 18 bp, Homo sapiens
ggctgagactgccggtgc

SEQ ID NO: 11370 - DNA, 17 bp, Homo sapiens
tggccgagagacctcgc

SEQ ID NO: 11371 - DNA, 18 bp, Homo sapiens
ggccgagggcgcgggtgc

SEQ ID NO: 11372 - DNA, 84 bp, Cowpox virus
ggcaaccttgaagttctgacgaactatcttgcagcttgtttctcaattttaaacgagctgagatccgatcaagaactcgttgcc

SEQ ID NO: 11373 - DNA, 24 bp, Cowpox virus
ttgaagttctgacgaactatcttg

SEQ ID NO: 11374 - DNA, 24 bp, Cowpox virus
tgagatccgatcaagaactcgttg

SEQ ID NO: 11375 - DNA, 22 bp, Homo sapiens
ttaaagttttggaaacatcttg

SEQ ID NO: 11376 - DNA, 21 bp, Homo sapiens
tgagatgtggcccactcgttg

SEQ ID NO: 11377 - DNA, 70 bp, Cowpox virus
gttcacatgattccggcatcgagtgttgcaaaatcgaaagcaactttctttgctctgtcggatggtgaat

SEQ ID NO: 11378 - DNA, 24 bp, Cowpox virus
tccggcatcgagtgttgcaaaatc

SEQ ID NO: 11379 - DNA, 17 bp, Cowpox virus
tctgtcggatggtgaat

SEQ ID NO: 11380 - DNA, 17 bp, Homo sapiens
ggcttctgctgcaaaat

SEQ ID NO: 11381 - DNA, 16 bp, Homo sapiens
tccagcatttgcaaaa

SEQ ID NO: 11382 - DNA, 66 bp, Cowpox virus
cgagaggaaacaaactgtcttggaacaatttccttgaagattttaaaacggcagttttctctctcg

SEQ ID NO: 11383 - DNA, 24 bp, Cowpox virus
gaggaaacaaactgtcttggaaca

SEQ ID NO: 11384 - DNA, 24 bp, Cowpox virus
cttgaagattttaaaacggcagtt

SEQ ID NO: 11385 - DNA, 18 bp, Homo sapiens
gaggaaatggaccgcagg

SEQ ID NO: 11386 - DNA, 20 bp, Homo sapiens
gagaaaacaaacttcacagg

SEQ ID NO: 11387 - DNA, 25 bp, Homo sapiens
gaggaaaccaggactctgtttggaa

SEQ ID NO: 11388 - DNA, 17 bp, Homo sapiens
gagggggactgtcctgg

SEQ ID NO: 11389 - DNA, 15 bp, Homo sapiens
gaggaaacaagttgg

SEQ ID NO: 11390 - DNA, 18 bp, Homo sapiens
gaggcaggtgttggaaca

SEQ ID NO: 11391 - DNA, 19 bp, Homo sapiens
gaggaaacaaagttgatgg

SEQ ID NO: 11392 - DNA, 19 bp, Homo sapiens
gagggggcaggtgccctga

SEQ ID NO: 11393 - DNA, 18 bp, Homo sapiens
ggaaacaaaatatttgga

SEQ ID NO: 11394 - DNA, 19 bp, Homo sapiens
gaggaaacgaacttccttg

SEQ ID NO: 11395 - DNA, 17 bp, Homo sapiens
gaggaaacaaattgtgg

SEQ ID NO: 11396 - DNA, 21 bp, Homo sapiens
gaggaaacacattcataccgg

SEQ ID NO: 11397 - DNA, 18 bp, Homo sapiens
gaggaaaaaattgtccca

SEQ ID NO: 11398 - DNA, 19 bp, Homo sapiens
ggaaacaaacgtggagaca

SEQ ID NO: 11399 - DNA, 22 bp, Homo sapiens
aggactgtatactgtcttggaa

SEQ ID NO: 11400 - DNA, 19 bp, Homo sapiens
gaggaaacaagttggctcg

SEQ ID NO: 11401 - DNA, 15 bp, Homo sapiens
gaggaaacaggcgga

SEQ ID NO: 11402 - DNA, 17 bp, Homo sapiens
gaggcaaactgttcccg

SEQ ID NO: 11403 - DNA, 20 bp, Homo sapiens
gagacagatgggctggaaca

SEQ ID NO: 11404 - DNA, 24 bp, Homo sapiens
gagggcagcacccatcttgggaca

SEQ ID NO: 11405 - DNA, 63 bp, Cowpox virus
gagtggcagctacaacacctcctcgtctaactctagaattcgagtgatggccgcttaccactc

SEQ ID NO: 11406 - DNA, 24 bp, Cowpox virus
tacaacacctcctcgtctaactct

SEQ ID NO: 11407 - DNA, 24 bp, Cowpox virus
gaattcgagtgatggccgcttacc

SEQ ID NO: 11408 - DNA, 15 bp, Homo sapiens
acacttcgtctaact

SEQ ID NO: 11409 - DNA, 22 bp, Homo sapiens
tacagttttcctcatctgctct

SEQ ID NO: 11410 - DNA, 18 bp, Homo sapiens
tacagaatctcctcgcct

SEQ ID NO: 11411 - DNA, 22 bp, Homo sapiens
cagcacctcccaggttagctct

SEQ ID NO: 11412 - DNA, 19 bp, Homo sapiens
tacggccctccccgcgact

SEQ ID NO: 11413 - DNA, 19 bp, Homo sapiens
tacagcaccccctttgctc

SEQ ID NO: 11414 - DNA, 15 bp, Homo sapiens
acctcctcctcctct

SEQ ID NO: 11415 - DNA, 66 bp, Cowpox virus
ggtgagctccccaagttttacttctctaaacaaaaaggatgctcggattggggcacgaagctcacc

SEQ ID NO: 11416 - DNA, 24 bp, Cowpox virus
ccccaagttttacttctctaaaca

SEQ ID NO: 11417 - DNA, 24 bp, Cowpox virus
tgctcggattggggcacgaagctc

SEQ ID NO: 11418 - DNA, 19 bp, Homo sapiens
ccatgtcaaacacttctct

SEQ ID NO: 11419 - DNA, 18 bp, Homo sapiens
ccaagttgtctctaaaca

SEQ ID NO: 11420 - DNA, 18 bp, Homo sapiens
ccaagttttatttcaaac

SEQ ID NO: 11421 - DNA, 18 bp, Homo sapiens
ccccaagtgccattttct

SEQ ID NO: 11422 - DNA, 18 bp, Homo sapiens
cccaagttttgcttcact

SEQ ID NO: 11423 - DNA, 21 bp, Homo sapiens
ccccaagtttggtaccaaaca

SEQ ID NO: 11424 - DNA, 15 bp, Homo sapiens
ccccaagtcctctct

SEQ ID NO: 11425 - DNA, 19 bp, Homo sapiens
cccgagccttttctaaaca

SEQ ID NO: 11426 - DNA, 21 bp, Homo sapiens
gtttcacaatttctctaaaca

SEQ ID NO: 11427 - DNA, 18 bp, Homo sapiens
ccccaagtttgatactct

SEQ ID NO: 11428 - DNA, 21 bp, Homo sapiens
gcttgtatacttttctaaaca

SEQ ID NO: 11429 - DNA, 15 bp, Homo sapiens
cccaagtttcatcca

SEQ ID NO: 11430 - DNA, 18 bp, Homo sapiens
ccaggttttctttcccta

SEQ ID NO: 11431 - DNA, 18 bp, Homo sapiens
ccctagtccctgctctct

SEQ ID NO: 11432 - DNA, 22 bp, Homo sapiens
cctaagtcttattccaagctaa

SEQ ID NO: 11433 - DNA, 18 bp, Homo sapiens
ccaagtcttttctctaaa

SEQ ID NO: 11434 - DNA, 19 bp, Homo sapiens
cccttaagcattctctaaa

SEQ ID NO: 11435 - DNA, 19 bp, Homo sapiens
ccccaaatttttccttaaa

SEQ ID NO: 11436 - DNA, 123 bp, African swine fever virus
caggctaaaacaaaggaggcgatttgggagggataacggttgttttccaccagggggtcgaccttttctagggtgtgaaggcaaaggtcatcttcttctgcatccataaaggtaattggtttg

SEQ ID NO: 11437 - DNA, 24 bp, African swine fever virus
tgtgaaggcaaaggtcatcttctt

SEQ ID NO: 11438 - DNA, 24 bp, African swine fever virus
ggttgttttccaccagggggtcga

SEQ ID NO: 11439 - DNA, 18 bp, Homo sapiens
gggggtaggtatcttctt

SEQ ID NO: 11440 - DNA, 19 bp, Homo sapiens
gtgagacaaaggtcatctt

SEQ ID NO: 11441 - DNA, 19 bp, Homo sapiens
tgaaggaagttatcttctt

SEQ ID NO: 11442 - DNA, 24 bp, Homo sapiens
ggttgtttttttccactaaattgg

SEQ ID NO: 11443 - DNA, 24 bp, Homo sapiens
ggctgccccatgtcagggggtcga

SEQ ID NO: 11444 - DNA, 19 bp, Homo sapiens
ggttgtttccactttttgg

SEQ ID NO: 11445 - DNA, 17 bp, Homo sapiens
ggttgttttctccttgg

SEQ ID NO: 11446 - DNA, 60 bp, African swine fever virus
tgcctgagagtaaacattgacggataaaacaaaaatgccccgcataactctatcatggca

SEQ ID NO: 11447 - DNA, 24 bp, African swine fever virus
tgagagtaaacattgacggataaa

SEQ ID NO: 11448 - DNA, 17 bp, African swine fever virus
ataactctatcatggca

SEQ ID NO: 11449 - DNA, 15 bp, Homo sapiens
tggagtagacagata

SEQ ID NO: 11450 - DNA, 18 bp, Homo sapiens
tgagaggaacattgaggg

SEQ ID NO: 11451 - DNA, 18 bp, Homo sapiens
tgagagcaggtgcagata

SEQ ID NO: 11452 - DNA, 24 bp, Homo sapiens
tgagaataaatgtaaatggataaa

SEQ ID NO: 11453 - DNA, 19 bp, Homo sapiens
tgagagcaggcactgaggg

SEQ ID NO: 11454 - DNA, 18 bp, Homo sapiens
tgagagtaaaattgtaga

SEQ ID NO: 11455 - DNA, 18 bp, Homo sapiens
ataacatcaccattggca

SEQ ID NO: 11456 - DNA, 18 bp, Homo sapiens
ataaccctgtctctggca

SEQ ID NO: 11457 - DNA, 18 bp, Homo sapiens
acaatgaccaccatggca

SEQ ID NO: 11458 - DNA, 76 bp, African swine fever virus
tcttaaccaaatgttggaagatcatttttttacctgctttaaaggcctgaagggtgtcggttggcaaggctattga

SEQ ID NO: 11459 - DNA, 24 bp, African swine fever virus
tggaagatcatttttttacctgct

SEQ ID NO: 11460 - DNA, 24 bp, African swine fever virus
cctgaagggtgtcggttggcaagg

SEQ ID NO: 11461 - DNA, 22 bp, Homo sapiens
tggggattcctttttacctgct

SEQ ID NO: 11462 - DNA, 20 bp, Homo sapiens
tgggtgaggctttttacctg

SEQ ID NO: 11463 - DNA, 26 bp, Homo sapiens
tggaagctcattttttaaacactgct

SEQ ID NO: 11464 - DNA, 17 bp, Homo sapiens
tggaggacattttttta

SEQ ID NO: 11465 - DNA, 19 bp, Homo sapiens
ctgggagggtgtcacccga

SEQ ID NO: 11466 - DNA, 16 bp, Homo sapiens
cctgaaggtgggtagg

SEQ ID NO: 11467 - DNA, 19 bp, Homo sapiens
cctggggggtgggggtggg

SEQ ID NO: 11468 - DNA, 23 bp, Homo sapiens
cctggaagagctggttggcaggg

SEQ ID NO: 11469 - DNA, 22 bp, Homo sapiens
ccaggagggtcggctggcaggg

SEQ ID NO: 11470 - DNA, 18 bp, Homo sapiens
cccgggggcggttggcgg

SEQ ID NO: 11471 - DNA, 18 bp, Homo sapiens
cctggaggggtggagtgg

SEQ ID NO: 11472 - DNA, 21 bp, Homo sapiens
cctgaagggtttgttagttga

SEQ ID NO: 11473 - DNA, 17 bp, Homo sapiens
cctgaaggtgggtaagg

SEQ ID NO: 11474 - DNA, 16 bp, Homo sapiens
tgaaggggccggcaag

SEQ ID NO: 11475 - DNA, 21 bp, Homo sapiens
ctggtgggtgggctggcaggg

SEQ ID NO: 11476 - DNA, 23 bp, Homo sapiens
tgggagggtaaaagttggcaagg

SEQ ID NO: 11477 - DNA, 19 bp, Homo sapiens
cctggaggggtgcggtggg

SEQ ID NO: 11478 - DNA, 15 bp, Homo sapiens
ctgaaggtgggtggg

SEQ ID NO: 11479 - DNA, 73 bp, African swine fever virus
gcaagcccattctgccagttggggattggcggctagaaaaccgcgccatagctggagggcaaaatgggcttgc

SEQ ID NO: 11480 - DNA, 24 bp, African swine fever virus
tgccagttggggattggcggctag

SEQ ID NO: 11481 - DNA, 24 bp, African swine fever virus
tagctggagggcaaaatgggcttg

SEQ ID NO: 11482 - DNA, 21 bp, Homo sapiens
tgctggtgggggcctcgggct

SEQ ID NO: 11483 - DNA, 21 bp, Homo sapiens
tgtcagttgagggttctcgct

SEQ ID NO: 11484 - DNA, 18 bp, Homo sapiens
tgccagcttggggattga

SEQ ID NO: 11485 - DNA, 23 bp, Homo sapiens
gctggaggccagaagtgggtttg

SEQ ID NO: 11486 - DNA, 15 bp, Homo sapiens
gctggagggtgaggc

SEQ ID NO: 11487 - DNA, 23 bp, Homo sapiens
gctgggaggcaggttggggcttg

SEQ ID NO: 11488 - DNA, 19 bp, Homo sapiens
gcaggagggcagaaggttg

SEQ ID NO: 11489 - DNA, 20 bp, Homo sapiens
gctggaggccagttagcttg

SEQ ID NO: 11490 - DNA, 19 bp, Homo sapiens
gctggagggagggaactta

SEQ ID NO: 11491 - DNA, 15 bp, Homo sapiens
ggaggggtgggcttg

SEQ ID NO: 11492 - DNA, 14 bp, Homo sapiens
agctggaaatgggt

SEQ ID NO: 11493 - DNA, 23 bp, Homo sapiens
tagatggagggtgggaaatgctt

SEQ ID NO: 11494 - DNA, 16 bp, Homo sapiens
gctggagggtaggtcc

SEQ ID NO: 11495 - DNA, 15 bp, Homo sapiens
gctggaggggaagcc

SEQ ID NO: 11496 - DNA, 18 bp, Homo sapiens
gctgcaaggagtgggctt

SEQ ID NO: 11497 - DNA, 15 bp, Homo sapiens
tggaaggcaaggact

SEQ ID NO: 11498 - DNA, 14 bp, Homo sapiens
gctgaagatgggct

SEQ ID NO: 11499 - DNA, 20 bp, Homo sapiens
tgggaggcgggataggcttg

SEQ ID NO: 11500 - DNA, 24 bp, Homo sapiens
agctggggcatgaaaatgggcttg

SEQ ID NO: 11501 - DNA, 69 bp, African swine fever virus
ggctcccatccacgtgtaggtttcgacgtcgtaggtgacaaagaggcgttcgacgcgaggatgagagcc

SEQ ID NO: 11502 - DNA, 24 bp, African swine fever virus
cacgtgtaggtttcgacgtcgtag

SEQ ID NO: 11503 - DNA, 24 bp, African swine fever virus
acaaagaggcgttcgacgcgagga

SEQ ID NO: 11504 - DNA, 18 bp, Homo sapiens
acaaaggagcgtttcagg

SEQ ID NO: 11505 - DNA, 19 bp, Homo sapiens
cagagagacgtctccgggg

SEQ ID NO: 11506 - DNA, 18 bp, Homo sapiens
gaggcgctgctgcgggga

SEQ ID NO: 11507 - DNA, 23 bp, Homo sapiens
gaggcgcctggccggtgcgggga

SEQ ID NO: 11508 - DNA, 15 bp, Homo sapiens
agaggcgcgcgagga

SEQ ID NO: 11509 - DNA, 19 bp, Homo sapiens
ggaaagaggcagcgcgagg

SEQ ID NO: 11510 - DNA, 19 bp, Homo sapiens
aagaggcgttttctaagga

SEQ ID NO: 11511 - DNA, 21 bp, Homo sapiens
acagggaggcgttggctcagg

SEQ ID NO: 11512 - DNA, 17 bp, Homo sapiens
aaagagacggggcgtgg

SEQ ID NO: 11513 - DNA, 19 bp, Homo sapiens
acaaagaggcagagtgagg

SEQ ID NO: 11514 - DNA, 20 bp, Homo sapiens
aaagaggcttatcctgggga

SEQ ID NO: 11515 - DNA, 20 bp, Homo sapiens
gaggcgctccctcccgagga

SEQ ID NO: 11516 - DNA, 14 bp, Homo sapiens
aagaagccgcgaag

SEQ ID NO: 11517 - DNA, 18 bp, Homo sapiens
agaggcgccccgtcgtgg

SEQ ID NO: 11518 - DNA, 20 bp, Homo sapiens
caaagaggtgtctcattagg

SEQ ID NO: 11519 - DNA, 70 bp, African swine fever virus
ttgacttgcaggagacgggtaagggccgatgccaggcggcgatgaaacttgatttccattggtgagttgg

SEQ ID NO: 11520 - DNA, 24 bp, African swine fever virus
caggagacgggtaagggccgatgc

SEQ ID NO: 11521 - DNA, 24 bp, African swine fever virus
tgaaacttgatttccattggtgag

SEQ ID NO: 11522 - DNA, 20 bp, Homo sapiens
ggagctggaggcggccgatg

SEQ ID NO: 11523 - DNA, 18 bp, Homo sapiens
caggagactggtgagtcc

SEQ ID NO: 11524 - DNA, 19 bp, Homo sapiens
gaggataaagggctgatgc

SEQ ID NO: 11525 - DNA, 19 bp, Homo sapiens
cagcagacaggggccgatg

SEQ ID NO: 11526 - DNA, 22 bp, Homo sapiens
gggacgggactcagggccgatg

SEQ ID NO: 11527 - DNA, 24 bp, Homo sapiens
ggagacgggcgaggtggcgcatcg

SEQ ID NO: 11528 - DNA, 20 bp, Homo sapiens
cagggggtggggtagggtcg

SEQ ID NO: 11529 - DNA, 21 bp, Homo sapiens
ggtgacaggaagggccggtgc

SEQ ID NO: 11530 - DNA, 19 bp, Homo sapiens
caggaagatgaggctgatg

SEQ ID NO: 11531 - DNA, 19 bp, Homo sapiens
caggaggagggtaaggcca

SEQ ID NO: 11532 - DNA, 20 bp, Homo sapiens
agaggtgggtgaggaggagc

SEQ ID NO: 11533 - DNA, 106 bp, African swine fever virus
ttctaactcttaacatttttatttatttaaaatgatacctttgttatttattttattctattttgcgaacggtatcgaatagcataagtttgaaacgagtgaagaa

SEQ ID NO: 11534 - DNA, 24 bp, African swine fever virus
tcgaatagcataagtttgaaacga

SEQ ID NO: 11535 - DNA, 24 bp, African swine fever virus
tttttatttatttaaaatgatacc

SEQ ID NO: 11536 - DNA, 20 bp, Homo sapiens
gaataacattcttgaaatga

SEQ ID NO: 11537 - DNA, 72 bp, African swine fever virus
gaagaagttatagacaaattattcattctaaaactataaaaacagaatgatacgatactatatgtattcttc

SEQ ID NO: 11538 - DNA, 24 bp, African swine fever virus
tgatacgatactatatgtattctt

SEQ ID NO: 11539 - DNA, 24 bp, African swine fever virus
gaagttatagacaaattattcatt

SEQ ID NO: 11540 - DNA, 24 bp, Homo sapiens
tggtactatgctatatatatcctc

SEQ ID NO: 11541 - DNA, 22 bp, Homo sapiens
agttatagaccaccatgacatt

SEQ ID NO: 11542 - DNA, 18 bp, Homo sapiens
gaggttacagatactcat

SEQ ID NO: 11543 - DNA, 26 bp, Homo sapiens
gaagttatgtacaaaacacactcatt

SEQ ID NO: 11544 - DNA, 114 bp, Fowlpox virus
ctatcgtatggataaatatattctagaatacaaaaatatggtctaatctcgctactggataaatcgaaaaatactttttattatatacatatagtctattaaacaaaatgatag

SEQ ID NO: 11545 - DNA, 24 bp, Fowlpox virus
tctagaatacaaaaatatggtcta

SEQ ID NO: 11546 - DNA, 24 bp, Fowlpox virus
tcgaaaaatactttttattatata

SEQ ID NO: 11547 - DNA, 18 bp, Homo sapiens
tctagaatactgaaatac

SEQ ID NO: 11548 - DNA, 19 bp, Homo sapiens
tagaacacaaaaagtttct

SEQ ID NO: 11549 - DNA, 18 bp, Homo sapiens
tctagaatgcacaatggt

SEQ ID NO: 11550 - DNA, 20 bp, Homo sapiens
tccatcataaaaaatatggt

SEQ ID NO: 11551 - DNA, 19 bp, Homo sapiens
tctggaatgcaaatatggt

SEQ ID NO: 11552 - DNA, 21 bp, Homo sapiens
tctaacttagaatatggtcta

SEQ ID NO: 11553 - DNA, 22 bp, Homo sapiens
tagaaacaaaaatcacaaatct

SEQ ID NO: 11554 - DNA, 90 bp, Fowlpox virus
gtcactagagacagcttggcgaaggggccagccaccatttacacttttggtgataatggatggactctttcacaagcctcgattagtggc

SEQ ID NO: 11555 - DNA, 24 bp, Fowlpox virus
atggatggactctttcacaagcct

SEQ ID NO: 11556 - DNA, 24 bp, Fowlpox virus
gcgaaggggccagccaccatttac

SEQ ID NO: 11557 - DNA, 19 bp, Homo sapiens
gggtggactcttggagcct

SEQ ID NO: 11558 - DNA, 19 bp, Homo sapiens
gatggactcggccatgggc

SEQ ID NO: 11559 - DNA, 17 bp, Homo sapiens
tgggtggagcacaggcc

SEQ ID NO: 11560 - DNA, 21 bp, Homo sapiens
tggatggatcaacataggcct

SEQ ID NO: 11561 - DNA, 78 bp, Fowlpox virus
gtttaacaatgggatatagatgacactaaagaatactattgtgaacaacatggtatgaattatctaactccgttagac

SEQ ID NO: 11562 - DNA, 24 bp, Fowlpox virus
tagatgacactaaagaatactatt

SEQ ID NO: 11563 - DNA, 24 bp, Fowlpox virus
tggtatgaattatctaactccgtt

SEQ ID NO: 11564 - DNA, 18 bp, Homo sapiens
tagatgacattgaaaaat

SEQ ID NO: 11565 - DNA, 75 bp, Fowlpox virus
ggcgccggcggccggcaccggaagcaagcatttctaactgcgcgagctggtagcggcgccggcggcacgggcgcc

SEQ ID NO: 11566 - DNA, 24 bp, Fowlpox virus
ggccggcaccggaagcaagcattt

SEQ ID NO: 11567 - DNA, 20 bp, Fowlpox virus
gcgccggcggcacgggcgcc

SEQ ID NO: 11568 - DNA, 19 bp, Homo sapiens
ggccagcatcgggggtagc

SEQ ID NO: 11569 - DNA, 21 bp, Homo sapiens
gcggcgggcagagcgggcgcc

SEQ ID NO: 11570 - DNA, 18 bp, Homo sapiens
gcccggcccccgggcgcc

SEQ ID NO: 11571 - DNA, 16 bp, Homo sapiens
gcccggcggcgagcgc

SEQ ID NO: 11572 - DNA, 19 bp, Homo sapiens
gctcggcgcgcatggtgcc

SEQ ID NO: 11573 - DNA, 18 bp, Homo sapiens
gcccggcggcgggagcgc

SEQ ID NO: 11574 - DNA, 17 bp, Homo sapiens
gcgtggtggcgggcgcc

SEQ ID NO: 11575 - DNA, 22 bp, Homo sapiens
gcggcggcggcagcgatgcgcc

SEQ ID NO: 11576 - DNA, 17 bp, Homo sapiens
gcgacggtggggactgc

SEQ ID NO: 11577 - DNA, 16 bp, Homo sapiens
gccggcggggggcgcc

SEQ ID NO: 11578 - DNA, 17 bp, Homo sapiens
gcgtggtggcaggcgcc

SEQ ID NO: 11579 - DNA, 22 bp, Homo sapiens
gcggcggcggcgggagactgcc

SEQ ID NO: 11580 - DNA, 17 bp, Homo sapiens
gcggcggcgacatcgcg

SEQ ID NO: 11581 - DNA, 17 bp, Homo sapiens
gcactgcggtgggcgcc

SEQ ID NO: 11582 - DNA, 18 bp, Homo sapiens
gcgccaggcccgggcgcc

SEQ ID NO: 11583 - DNA, 17 bp, Homo sapiens
gcccggccccgggcgcc

SEQ ID NO: 11584 - DNA, 15 bp, Homo sapiens
gccggcggcggagcc

SEQ ID NO: 11585 - DNA, 18 bp, Homo sapiens
gcgccggcggttcggagc

SEQ ID NO: 11586 - DNA, 18 bp, Homo sapiens
gcccgaccggcgggcgcc

SEQ ID NO: 11587 - DNA, 17 bp, Homo sapiens
gcgcccgcgcccgcgcc

SEQ ID NO: 11588 - DNA, 18 bp, Homo sapiens
gcggcggcggcagcagcc

SEQ ID NO: 11589 - DNA, 18 bp, Homo sapiens
gcccggcggcacgaggcc

SEQ ID NO: 11590 - DNA, 18 bp, Homo sapiens
gctccgccacgcgggcgc

SEQ ID NO: 11591 - DNA, 19 bp, Homo sapiens
gccggcggcgcggatctgc

SEQ ID NO: 11592 - DNA, 17 bp, Homo sapiens
gcgccggcgcgactgcc

SEQ ID NO: 11593 - DNA, 18 bp, Homo sapiens
gcgccggctggagccgcc

SEQ ID NO: 11594 - DNA, 17 bp, Homo sapiens
gctggcgcgcggacgcc

SEQ ID NO: 11595 - DNA, 16 bp, Homo sapiens
cgctggggcgggcgcc

SEQ ID NO: 11596 - DNA, 18 bp, Homo sapiens
gcgccggcggcccccggc

SEQ ID NO: 11597 - DNA, 20 bp, Homo sapiens
gcggcggcagcgcaggcgcc

SEQ ID NO: 11598 - DNA, 17 bp, Homo sapiens
gcgccgggaggaggcgc

SEQ ID NO: 11599 - DNA, 17 bp, Homo sapiens
gcggtggcggcggcacc

SEQ ID NO: 11600 - DNA, 16 bp, Homo sapiens
gcgccgggagggtgcc

SEQ ID NO: 11601 - DNA, 20 bp, Homo sapiens
gcgcagggcatacgggcgcc

SEQ ID NO: 11602 - DNA, 14 bp, Homo sapiens
gcgccggcagccgc

SEQ ID NO: 11603 - DNA, 19 bp, Homo sapiens
gcgccggctgtggggcgcc

SEQ ID NO: 11604 - DNA, 23 bp, Homo sapiens
gctcggcggcagcaaatggcgcc

SEQ ID NO: 11605 - DNA, 19 bp, Homo sapiens
gcgccgaggagcgggcgcc

SEQ ID NO: 11606 - DNA, 20 bp, Homo sapiens
gcgcccgcggtcagcgcgcc

SEQ ID NO: 11607 - DNA, 19 bp, Homo sapiens
gcgccggccgccaggcgcc

SEQ ID NO: 11608 - DNA, 17 bp, Homo sapiens
gccggggcacgggtgcc

SEQ ID NO: 11609 - DNA, 18 bp, Homo sapiens
gccggcgggcgcagcgcc

SEQ ID NO: 11610 - DNA, 17 bp, Homo sapiens
gccccggcggccccgcc

SEQ ID NO: 11611 - DNA, 19 bp, Homo sapiens
gcggccgggaccgggcgcc

SEQ ID NO: 11612 - DNA, 19 bp, Homo sapiens
gcgctcggtgctcggcgcc

SEQ ID NO: 11613 - DNA, 18 bp, Homo sapiens
gcgcggggggcgggcgcc

SEQ ID NO: 11614 - DNA, 19 bp, Homo sapiens
gcggcggcgggcgggcgcc

SEQ ID NO: 11615 - DNA, 17 bp, Homo sapiens
cgccggcggcccccgcc

SEQ ID NO: 11616 - DNA, 18 bp, Homo sapiens
gcgcggcgggcgggcgcc

SEQ ID NO: 11617 - DNA, 20 bp, Homo sapiens
gccccggcggcctcgcgcgc

SEQ ID NO: 11618 - DNA, 18 bp, Homo sapiens
gcgctcgggtcgggcgcc

SEQ ID NO: 11619 - DNA, 16 bp, Homo sapiens
gcgtcccgcgggcgcc

SEQ ID NO: 11620 - DNA, 15 bp, Homo sapiens
gccgcggcgggcgcc

SEQ ID NO: 11621 - DNA, 15 bp, Homo sapiens
gcgccggcagcgcgc

SEQ ID NO: 11622 - DNA, 17 bp, Homo sapiens
gcccacgcgcgggcgcc

SEQ ID NO: 11623 - DNA, 19 bp, Homo sapiens
gcgtcggcgcgtcgcagcc

SEQ ID NO: 11624 - DNA, 17 bp, Homo sapiens
gcccggctccaggcgcc

SEQ ID NO: 11625 - DNA, 21 bp, Homo sapiens
gcgccggcaggccctggcgcc

SEQ ID NO: 11626 - DNA, 19 bp, Homo sapiens
gcagcgcagcgcgggcgcc

SEQ ID NO: 11627 - DNA, 17 bp, Homo sapiens
ggccggcaccgggcgcc

SEQ ID NO: 11628 - DNA, 17 bp, Homo sapiens
gccgggcgccgggcgcc

SEQ ID NO: 11629 - DNA, 17 bp, Homo sapiens
gcagccgggcgggcgcc

SEQ ID NO: 11630 - DNA, 19 bp, Homo sapiens
gccgctccgcgcgggcgcc

SEQ ID NO: 11631 - DNA, 16 bp, Homo sapiens
gcgccggtggcgcgcc

SEQ ID NO: 11632 - DNA, 21 bp, Homo sapiens
gccccggcggccctcagtgcc

SEQ ID NO: 11633 - DNA, 18 bp, Homo sapiens
ggctggcatccgggcgcc

SEQ ID NO: 11634 - DNA, 19 bp, Homo sapiens
gctcggggtccggcgggcg

SEQ ID NO: 11635 - DNA, 20 bp, Homo sapiens
gcggcggcggcggcagcgcc

SEQ ID NO: 11636 - DNA, 18 bp, Homo sapiens
gcgccggccgcccgcgcc

SEQ ID NO: 11637 - DNA, 17 bp, Homo sapiens
gcgccgcgcgggggcgc

SEQ ID NO: 11638 - DNA, 16 bp, Homo sapiens
gcccgcggccgaggcc

SEQ ID NO: 11639 - DNA, 17 bp, Homo sapiens
gcagctgcgcgggcgcc

SEQ ID NO: 11640 - DNA, 18 bp, Homo sapiens
acgccggcggcatgaagc

SEQ ID NO: 11641 - DNA, 19 bp, Homo sapiens
gcgcccggctgcaggcgcc

SEQ ID NO: 11642 - DNA, 17 bp, Homo sapiens
gcccggcggcccccgcc

SEQ ID NO: 11643 - DNA, 16 bp, Homo sapiens
gctccgagcgggcgcc

SEQ ID NO: 11644 - DNA, 18 bp, Homo sapiens
gccggcggcggcggcgcc

SEQ ID NO: 11645 - DNA, 17 bp, Homo sapiens
gctcggcggcgggcgcc

SEQ ID NO: 11646 - DNA, 18 bp, Homo sapiens
gcctcggccgcgggcgcc

SEQ ID NO: 11647 - DNA, 15 bp, Homo sapiens
gcccgcgcgggcgcc

SEQ ID NO: 11648 - DNA, 18 bp, Homo sapiens
gcgctagaggcgggcgcc

SEQ ID NO: 11649 - DNA, 18 bp, Homo sapiens
gcgcctgctccgggcgcc

SEQ ID NO: 11650 - DNA, 18 bp, Homo sapiens
gcggctgcggcgggcgcc

SEQ ID NO: 11651 - DNA, 17 bp, Homo sapiens
gcgcctgcccaggcgcc

SEQ ID NO: 11652 - DNA, 15 bp, Homo sapiens
gccggcggtggcgcc

SEQ ID NO: 11653 - DNA, 16 bp, Homo sapiens
gctggggacgggcgcc

SEQ ID NO: 11654 - DNA, 17 bp, Homo sapiens
gcgctggctacgggcgc

SEQ ID NO: 11655 - DNA, 18 bp, Homo sapiens
gctgcggcgcggacggcc

SEQ ID NO: 11656 - DNA, 18 bp, Homo sapiens
gctcggctcccgggcgcc

SEQ ID NO: 11657 - DNA, 21 bp, Homo sapiens
gcgccggcccggccgggtgcc

SEQ ID NO: 11658 - DNA, 19 bp, Homo sapiens
gctggaagcggcgggcgcc

SEQ ID NO: 11659 - DNA, 17 bp, Homo sapiens
gccacgaggcgggcgcc

SEQ ID NO: 11660 - DNA, 17 bp, Homo sapiens
gccccggcggcggagcc

SEQ ID NO: 11661 - DNA, 15 bp, Homo sapiens
gcgccgtcggggcgc

SEQ ID NO: 11662 - DNA, 18 bp, Homo sapiens
gccggcgggtggggggcc

SEQ ID NO: 11663 - DNA, 19 bp, Homo sapiens
gcgccgggcgccgggcgcc

SEQ ID NO: 11664 - DNA, 17 bp, Homo sapiens
gctccgcgccgggcgcc

SEQ ID NO: 11665 - DNA, 17 bp, Homo sapiens
gctccggcggcggcgcc

SEQ ID NO: 11666 - DNA, 20 bp, Homo sapiens
gcggcggcggcggcggcgcc

SEQ ID NO: 11667 - DNA, 18 bp, Homo sapiens
cgcgtcggcgcgggcgcc

SEQ ID NO: 11668 - DNA, 21 bp, Homo sapiens
gcgccggcgcgcggccgggcg

SEQ ID NO: 11669 - DNA, 18 bp, Homo sapiens
gcctgcttgacgggcgcc

SEQ ID NO: 11670 - DNA, 20 bp, Homo sapiens
acgtcccaccagcgggcgcc

SEQ ID NO: 11671 - DNA, 19 bp, Homo sapiens
gcgctaccggcacgggcgc

SEQ ID NO: 11672 - DNA, 19 bp, Homo sapiens
gcacgggggtgcgggtgcc

SEQ ID NO: 11673 - DNA, 20 bp, Homo sapiens
gcgccgggagcccgggcgcc

SEQ ID NO: 11674 - DNA, 19 bp, Homo sapiens
gcaccggagcgcgggcgcc

SEQ ID NO: 11675 - DNA, 19 bp, Homo sapiens
gcggcggcggcggcggcgc

SEQ ID NO: 11676 - DNA, 17 bp, Homo sapiens
gccggaccacgggcgcc

SEQ ID NO: 11677 - DNA, 18 bp, Homo sapiens
gcggcggcggcagcagcg

SEQ ID NO: 11678 - DNA, 19 bp, Homo sapiens
cgccggcgtcccgggcgcc

SEQ ID NO: 11679 - DNA, 17 bp, Homo sapiens
gctcggagccgggcgcc

SEQ ID NO: 11680 - DNA, 17 bp, Homo sapiens
gcgcggggtcgggcgcc

SEQ ID NO: 11681 - DNA, 15 bp, Homo sapiens
gcccggcggctgcgc

SEQ ID NO: 11682 - DNA, 18 bp, Homo sapiens
cgccgaagctacgggcgc

SEQ ID NO: 11683 - DNA, 19 bp, Homo sapiens
gcctcggtcaccgggcgcc

SEQ ID NO: 11684 - DNA, 21 bp, Homo sapiens
gcgcttgcgcaccgcggtgcc

SEQ ID NO: 11685 - DNA, 19 bp, Homo sapiens
gcgccggtgccgggtagcc

SEQ ID NO: 11686 - DNA, 15 bp, Homo sapiens
acgccggcgatgcgc

SEQ ID NO: 11687 - DNA, 16 bp, Homo sapiens
gcgccggcgtggccgc

SEQ ID NO: 11688 - DNA, 18 bp, Homo sapiens
gcggcggcggctgcagcc

SEQ ID NO: 11689 - DNA, 18 bp, Homo sapiens
gcagcccagcacgggtgc

SEQ ID NO: 11690 - DNA, 20 bp, Homo sapiens
gcctcggctcggcgggcgcc

SEQ ID NO: 11691 - DNA, 19 bp, Homo sapiens
gctcggcccctcgggcgcc

SEQ ID NO: 11692 - DNA, 17 bp, Homo sapiens
cgccggcagccggcgcc

SEQ ID NO: 11693 - DNA, 17 bp, Homo sapiens
gcgtgatggcgggcgcc

SEQ ID NO: 11694 - DNA, 17 bp, Homo sapiens
gcccgatcccgggcgcc

SEQ ID NO: 11695 - DNA, 18 bp, Homo sapiens
gcgccgcgtgcaggcgcc

SEQ ID NO: 11696 - DNA, 15 bp, Homo sapiens
cgccggcggggctgc

SEQ ID NO: 11697 - DNA, 17 bp, Homo sapiens
gccctccgacgggcgcc

SEQ ID NO: 11698 - DNA, 18 bp, Homo sapiens
cggcggatggcgggcgcc

SEQ ID NO: 11699 - DNA, 18 bp, Homo sapiens
gccccggcgtccggcgcc

SEQ ID NO: 11700 - DNA, 18 bp, Homo sapiens
gccccggcagccggcgcc

SEQ ID NO: 11701 - DNA, 15 bp, Homo sapiens
gcgccggggctgcgc

SEQ ID NO: 11702 - DNA, 17 bp, Homo sapiens
cgcctgccgcgggcgcc

SEQ ID NO: 11703 - DNA, 20 bp, Homo sapiens
gcgccggcagtctccgcgcc

SEQ ID NO: 11704 - DNA, 15 bp, Homo sapiens
gccgccgcgggcgcc

SEQ ID NO: 11705 - DNA, 18 bp, Homo sapiens
gcgccggccgtctccgcc

SEQ ID NO: 11706 - DNA, 21 bp, Homo sapiens
gcggcggcggcagagtaggcc

SEQ ID NO: 11707 - DNA, 15 bp, Homo sapiens
gcgccggcgcgcagc

SEQ ID NO: 11708 - DNA, 17 bp, Homo sapiens
gcgccagcgccggcgcc

SEQ ID NO: 11709 - DNA, 61 bp, Human herpesvirus 4
gcccgacccccgggcgcccccaaactttgtccagatgtccaggggtccccgagggtgaggc

SEQ ID NO: 11710 - DNA, 24 bp, Human herpesvirus 4
tgtccaggggtccccgagggtgag

SEQ ID NO: 11711 - DNA, 24 bp, Human herpesvirus 4
acccccgggcgcccccaaactttg

SEQ ID NO: 11712 - DNA, 16 bp, Homo sapiens
tgtccaggcgggggtg

SEQ ID NO: 11713 - DNA, 22 bp, Homo sapiens
tgtccaggggttcactggcaag

SEQ ID NO: 11714 - DNA, 18 bp, Homo sapiens
ggtgtccctgagggtgag

SEQ ID NO: 11715 - DNA, 25 bp, Homo sapiens
tgtcgggggagaaggtgagggtgag

SEQ ID NO: 11716 - DNA, 19 bp, Homo sapiens
tgttcagggatccccggcg

SEQ ID NO: 11717 - DNA, 20 bp, Homo sapiens
tgtccaggggactggaggtg

SEQ ID NO: 11718 - DNA, 15 bp, Homo sapiens
tgtccaggggcggtg

SEQ ID NO: 11719 - DNA, 24 bp, Homo sapiens
tggccaggggcagggcagggtgag

SEQ ID NO: 11720 - DNA, 17 bp, Homo sapiens
tgtcaggtgtgggggtg

SEQ ID NO: 11721 - DNA, 22 bp, Homo sapiens
tgtccagggtctccacgctggg

SEQ ID NO: 11722 - DNA, 14 bp, Homo sapiens
tccaggggagggtg

SEQ ID NO: 11723 - DNA, 17 bp, Homo sapiens
tccctgcctcgagggtg

SEQ ID NO: 11724 - DNA, 21 bp, Homo sapiens
tgtccagggtcccttcctggg

SEQ ID NO: 11725 - DNA, 18 bp, Homo sapiens
tgtccggggatccctgag

SEQ ID NO: 11726 - DNA, 16 bp, Homo sapiens
tgtccagggaagggtg

SEQ ID NO: 11727 - DNA, 78 bp, Human herpesvirus 4
atggacattgttatgttatagcttttaatggaaataaagtttggccttcacaagatttaatacaagatcaatgtccat

SEQ ID NO: 11728 - DNA, 24 bp, Human herpesvirus 4
tatgttatagcttttaatggaaat

SEQ ID NO: 11729 - DNA, 23 bp, Human herpesvirus 4
tttaatacaagatcaatgtccat

SEQ ID NO: 11730 - DNA, 19 bp, Homo sapiens
tatgttatagcttacaaaa

SEQ ID NO: 11731 - DNA, 17 bp, Homo sapiens
gttataactttaatgga

SEQ ID NO: 11732 - DNA, 20 bp, Homo sapiens
tatgttatagtttccaaaga

SEQ ID NO: 11733 - DNA, 83 bp, Human herpesvirus 4
tcctttgctcaagcatatataacaaaggtacttatgaaaaggaaaaagcaacctactttacgagatatagcttttccaaagga

SEQ ID NO: 11734 - DNA, 24 bp, Human herpesvirus 4
aaaggtacttatgaaaaggaaaaa

SEQ ID NO: 11735 - DNA, 18 bp, Human herpesvirus 4
tatagcttttccaaagga

SEQ ID NO: 11736 - DNA, 19 bp, Homo sapiens
ggaggtacctacggagaaa

SEQ ID NO: 11737 - DNA, 22 bp, Homo sapiens
aaagggacttattcttgagaaa

SEQ ID NO: 11738 - DNA, 22 bp, Homo sapiens
aaaggtactggcctcggaggaa

SEQ ID NO: 11739 - DNA, 19 bp, Homo sapiens
agctacaatggaaaggaaa

SEQ ID NO: 11740 - DNA, 20 bp, Homo sapiens
aaaggtacttttgatacaga

SEQ ID NO: 11741 - DNA, 22 bp, Homo sapiens
aaaggggaggaaaaaggaaaaa

SEQ ID NO: 11742 - DNA, 18 bp, Homo sapiens
agggaccaatgaaaagga

SEQ ID NO: 11743 - DNA, 19 bp, Homo sapiens
ggcacttagtgaaaaggaa

SEQ ID NO: 11744 - DNA, 20 bp, Homo sapiens
aaaggatttatgaaacaaaa

SEQ ID NO: 11745 - DNA, 17 bp, Homo sapiens
aggcagaaaaaggaaaa

SEQ ID NO: 11746 - DNA, 24 bp, Homo sapiens
aaagatgcttaaaattaggaaaaa

SEQ ID NO: 11747 - DNA, 21 bp, Homo sapiens
aagggactgataaaggaaaaa

SEQ ID NO: 11748 - DNA, 19 bp, Homo sapiens
aaaggaaaaaaaaaggaaa

SEQ ID NO: 11749 - DNA, 21 bp, Homo sapiens
ggtacctcttgaaaagggaaa

SEQ ID NO: 11750 - DNA, 18 bp, Homo sapiens
aaaggtgacagaaaagga

SEQ ID NO: 11751 - DNA, 19 bp, Homo sapiens
aaaggttttatatgaaagg

SEQ ID NO: 11752 - DNA, 20 bp, Homo sapiens
aaaggagaaaagaaaaggaa

SEQ ID NO: 11753 - DNA, 20 bp, Homo sapiens
aaaggaaaggaaaaaggaaa

SEQ ID NO: 11754 - DNA, 20 bp, Homo sapiens
aaaggaaagggaaaaggaaa

SEQ ID NO: 11755 - DNA, 21 bp, Homo sapiens
aaaggaaagggaaaaaggaaa

SEQ ID NO: 11756 - DNA, 19 bp, Homo sapiens
agtacttatgagaaaaaga

SEQ ID NO: 11757 - DNA, 22 bp, Homo sapiens
aaaggtcacttcaggaagggga

SEQ ID NO: 11758 - DNA, 19 bp, Homo sapiens
aaggcactgggaggaggaa

SEQ ID NO: 11759 - DNA, 15 bp, Homo sapiens
aaggtgtgaaaagga

SEQ ID NO: 11760 - DNA, 16 bp, Homo sapiens
aaaggtagaaaaagga

SEQ ID NO: 11761 - DNA, 17 bp, Homo sapiens
aaagtgtaccaaaaagg

SEQ ID NO: 11762 - DNA, 16 bp, Homo sapiens
agaactgtgaaaagga

SEQ ID NO: 11763 - DNA, 19 bp, Homo sapiens
aggtaagaaaaaggaaaaa

SEQ ID NO: 11764 - DNA, 19 bp, Homo sapiens
gcttttatgaaaggggaaa

SEQ ID NO: 11765 - DNA, 21 bp, Homo sapiens
aaaggaggtcagaaaaggaaa

SEQ ID NO: 11766 - DNA, 20 bp, Homo sapiens
aaaggaactattaaaaggaa

SEQ ID NO: 11767 - DNA, 17 bp, Homo sapiens
ggtaagaaaaggaaaaa

SEQ ID NO: 11768 - DNA, 21 bp, Homo sapiens
aaggtactttctatggggaaa

SEQ ID NO: 11769 - DNA, 19 bp, Homo sapiens
aaggagcaagaaaaggaaa

SEQ ID NO: 11770 - DNA, 22 bp, Homo sapiens
aaaggcaggctcagaaggaaaa

SEQ ID NO: 11771 - DNA, 23 bp, Homo sapiens
aaggataacacagaaaggaaaaa

SEQ ID NO: 11772 - DNA, 18 bp, Homo sapiens
aaagatactaaagaagga

SEQ ID NO: 11773 - DNA, 16 bp, Homo sapiens
aggtaaacgaaaggga

SEQ ID NO: 11774 - DNA, 19 bp, Homo sapiens
ggaggcagggaaaaaggaa

SEQ ID NO: 11775 - DNA, 23 bp, Homo sapiens
ggagggagaatgaagaggaaaaa

SEQ ID NO: 11776 - DNA, 20 bp, Homo sapiens
aaagggaaagaaaaaggaaa

SEQ ID NO: 11777 - DNA, 18 bp, Homo sapiens
aaagggaaaaaaaggaaa

SEQ ID NO: 11778 - DNA, 19 bp, Homo sapiens
agatatccctgaaaaggaa

SEQ ID NO: 11779 - DNA, 23 bp, Homo sapiens
aaaggtttcacgcaaaggaaaaa

SEQ ID NO: 11780 - DNA, 18 bp, Homo sapiens
aggcacttagtggggagg

SEQ ID NO: 11781 - DNA, 21 bp, Homo sapiens
agggttcatgggaaaggaaaa

SEQ ID NO: 11782 - DNA, 19 bp, Homo sapiens
ggtaaaagtggaaaggaaa

SEQ ID NO: 11783 - DNA, 19 bp, Homo sapiens
ggtacaaaaaaaggaaaaa

SEQ ID NO: 11784 - DNA, 16 bp, Homo sapiens
aggtattgaaaaggaa

SEQ ID NO: 11785 - DNA, 20 bp, Homo sapiens
aaggctaacttggaaaagga

SEQ ID NO: 11786 - DNA, 18 bp, Homo sapiens
agacgtatgaaaggaaaa

SEQ ID NO: 11787 - DNA, 23 bp, Homo sapiens
ggaggaggatgaagaaggaaaaa

SEQ ID NO: 11788 - DNA, 19 bp, Homo sapiens
aagatgcttatgaaacaaa

SEQ ID NO: 11789 - DNA, 23 bp, Homo sapiens
tgagccccttgtgagaaggaaaa

SEQ ID NO: 11790 - DNA, 18 bp, Homo sapiens
aaaggaacttgaggagga

SEQ ID NO: 11791 - DNA, 22 bp, Homo sapiens
aaaggaaacgcaggaaaggaaa

SEQ ID NO: 11792 - DNA, 15 bp, Homo sapiens
aaaggaaaaaggaaa

SEQ ID NO: 11793 - DNA, 60 bp, Human herpesvirus 4
cgctgtcgcagctctttcccggcctggctctgttggccgtgaccgagagcgtgcgcagcg

SEQ ID NO: 11794 - DNA, 24 bp, Human herpesvirus 4
tcgcagctctttcccggcctggct

SEQ ID NO: 11795 - DNA, 23 bp, Human herpesvirus 4
cgtgaccgagagcgtgcgcagcg

SEQ ID NO: 11796 - DNA, 20 bp, Homo sapiens
tctagctcttttgaagatgg

SEQ ID NO: 11797 - DNA, 21 bp, Homo sapiens
tcggactctcctggcctggct

SEQ ID NO: 11798 - DNA, 18 bp, Homo sapiens
tcgggctgctggcctggc

SEQ ID NO: 11799 - DNA, 21 bp, Homo sapiens
gcagtccagcttggcctggct

SEQ ID NO: 11800 - DNA, 21 bp, Homo sapiens
tcccagctccctggcctggct

SEQ ID NO: 11801 - DNA, 24 bp, Homo sapiens
tctggcttctgggccggcctggct

SEQ ID NO: 11802 - DNA, 18 bp, Homo sapiens
gcaactctttctttttgg

SEQ ID NO: 11803 - DNA, 16 bp, Homo sapiens
tcccagctctgcctgg

SEQ ID NO: 11804 - DNA, 21 bp, Homo sapiens
gctggtcgaggctgcgcagcg

SEQ ID NO: 11805 - DNA, 19 bp, Homo sapiens
cgtgaccgggtagccaacg

SEQ ID NO: 11806 - DNA, 23 bp, Homo sapiens
cgtgaccgtaggtgtcgcgtgcg

SEQ ID NO: 11807 - DNA, 18 bp, Homo sapiens
ccgagggcgtgcgcggcg

SEQ ID NO: 11808 - DNA, 20 bp, Homo sapiens
gcggccgggacagcgcagcg

SEQ ID NO: 11809 - DNA, 19 bp, Homo sapiens
cgcgaccggggaaggtggc

SEQ ID NO: 11810 - DNA, 17 bp, Homo sapiens
cgtggttgagcgccggc

SEQ ID NO: 11811 - DNA, 16 bp, Homo sapiens
gtgacgagcgtgcggc

SEQ ID NO: 11812 - DNA, 18 bp, Homo sapiens
cggaccgagaggtaacag

SEQ ID NO: 11813 - DNA, 19 bp, Homo sapiens
gtaattgagggacacagcg

SEQ ID NO: 11814 - DNA, 21 bp, Homo sapiens
cgcggttgggaacgtgcggcg

SEQ ID NO: 11815 - DNA, 69 bp, Human herpesvirus 4
ctgagaatactgaggattggggatggctggcatatactgactcttttccatcccccatctgtattgaag

SEQ ID NO: 11816 - DNA, 24 bp, Human herpesvirus 4
tgaggattggggatggctggcata

SEQ ID NO: 11817 - DNA, 24 bp, Human herpesvirus 4
ttccatcccccatctgtattgaag

SEQ ID NO: 11818 - DNA, 18 bp, Homo sapiens
ggtggggacagtggctgg

SEQ ID NO: 11819 - DNA, 20 bp, Homo sapiens
tgggggttgggggtcgggtg

SEQ ID NO: 11820 - DNA, 19 bp, Homo sapiens
tgggggttgggggtggaac

SEQ ID NO: 11821 - DNA, 18 bp, Homo sapiens
agggttggggatgaactg

SEQ ID NO: 11822 - DNA, 22 bp, Homo sapiens
tgagaattggggatataaacat

SEQ ID NO: 11823 - DNA, 21 bp, Homo sapiens
tggggcttggggatgacccgc

SEQ ID NO: 11824 - DNA, 96 bp, Human herpesvirus 4
atctggaagaaaaattatactctgtcatctgtattagcagaatgtgtaaatcaagccatggaatatggtatagatgaagtattatccaaactagat

SEQ ID NO: 11825 - DNA, 24 bp, Human herpesvirus 4
tctgtcatctgtattagcagaatg

SEQ ID NO: 11826 - DNA, 24 bp, Human herpesvirus 4
tggtatagatgaagtattatccaa

SEQ ID NO: 11827 - DNA, 22 bp, Homo sapiens
tgctcattgagaaggcagaatg

SEQ ID NO: 11828 - DNA, 19 bp, Homo sapiens
tctgtcatttttattaagc

SEQ ID NO: 11829 - DNA, 17 bp, Homo sapiens
tctgtcattgtattagc

SEQ ID NO: 11830 - DNA, 21 bp, Homo sapiens
tcttcataaattagcagaatg

SEQ ID NO: 11831 - DNA, 131 bp, Human herpesvirus 4
ttacaatgtcaaacaaactaggaatctaaatacttccactgcatgggaaatatatttatattatgagatcatcattcctaccactatatatacacagaattggaatataaagaatctaggtcaccttgtaa

SEQ ID NO: 11832 - DNA, 24 bp, Human herpesvirus 4
taccactatatatacacagaattg

SEQ ID NO: 11833 - DNA, 24 bp, Human herpesvirus 4
tctaaatacttccactgcatggga

SEQ ID NO: 11834 - DNA, 20 bp, Homo sapiens
taccattatatatatacaga

SEQ ID NO: 11835 - DNA, 21 bp, Homo sapiens
cattactctatcacagaattg

SEQ ID NO: 11836 - DNA, 20 bp, Homo sapiens
ctttataaaacacagaattg

SEQ ID NO: 11837 - DNA, 72 bp, Human herpesvirus 4
acagatgaatacttggaaattgaacccctaaagaatgggagttatttggttttatcaagtactacagactgt

SEQ ID NO: 11838 - DNA, 24 bp, Human herpesvirus 4
agttatttggttttatcaagtact

SEQ ID NO: 11839 - DNA, 24 bp, Human herpesvirus 4
tacttggaaattgaacccctaaag

SEQ ID NO: 11840 - DNA, 18 bp, Homo sapiens
agttatatggttttacaa

SEQ ID NO: 11841 - DNA, 18 bp, Homo sapiens
gttatttggttctagcaa

SEQ ID NO: 11842 - DNA, 88 bp, Human herpesvirus 4
agtcgcaagggccaaggcagagcttctacgcttggaccttcacgaaggagactatccagagtggctgcagctccttggagaagcaact

SEQ ID NO: 11843 - DNA, 24 bp, Human herpesvirus 4
tcgcaagggccaaggcagagcttc

SEQ ID NO: 11844 - DNA, 24 bp, Human herpesvirus 4
tccagagtggctgcagctccttgg

SEQ ID NO: 11845 - DNA, 18 bp, Homo sapiens
cgcaagggctgaggccag

SEQ ID NO: 11846 - DNA, 20 bp, Homo sapiens
gcaggggctgcaagagcttc

SEQ ID NO: 11847 - DNA, 27 bp, Homo sapiens
tcgcaaggggtggggagcaaggagctt

SEQ ID NO: 11848 - DNA, 16 bp, Homo sapiens
tcgcgggggcagggct

SEQ ID NO: 11849 - DNA, 19 bp, Homo sapiens
aagggccacgaggagcttc

SEQ ID NO: 11850 - DNA, 73 bp, Human herpesvirus 4
aggtaatttcataaaggacactgctggaggtatttttggaactgcctttagttttctgggatatgtaaaacct

SEQ ID NO: 11851 - DNA, 24 bp, Human herpesvirus 4
aaggacactgctggaggtattttt

SEQ ID NO: 11852 - DNA, 24 bp, Human herpesvirus 4
tgcctttagttttctgggatatgt

SEQ ID NO: 11853 - DNA, 17 bp, Homo sapiens
ggagtgctgtgtatttt

SEQ ID NO: 11854 - DNA, 20 bp, Homo sapiens
agggtgctgttgggggcact

SEQ ID NO: 11855 - DNA, 22 bp, Homo sapiens
ggacgctgtggggagcattttt

SEQ ID NO: 11856 - DNA, 19 bp, Homo sapiens
ggacactgctcggggggca

SEQ ID NO: 11857 - DNA, 22 bp, Homo sapiens
agacactgttaacatagttttt

SEQ ID NO: 11858 - DNA, 22 bp, Homo sapiens
aggcattgctggactcattttt

SEQ ID NO: 11859 - DNA, 19 bp, Homo sapiens
gggtgtggctggaggcact

SEQ ID NO: 11860 - DNA, 63 bp, Cherry mottle leaf virus
atacagcaagacaaatgggcattaaacgtctgggccaccaggtggtgccaagtttagatgtgt

SEQ ID NO: 11861 - DNA, 18 bp, Cherry mottle leaf virus
tgccaagtttagatgtgt

SEQ ID NO: 11862 - DNA, 24 bp, Cherry mottle leaf virus
gggcattaaacgtctgggccacca

SEQ ID NO: 11863 - DNA, 18 bp, Homo sapiens
gccagattgtagatgtgt

SEQ ID NO: 11864 - DNA, 21 bp, Homo sapiens
tgctgagtttagaaccagtgt

SEQ ID NO: 11865 - DNA, 15 bp, Homo sapiens
tgccaagttctgcat

SEQ ID NO: 11866 - DNA, 17 bp, Homo sapiens
taccaagtccagtgtgt

SEQ ID NO: 11867 - DNA, 17 bp, Homo sapiens
tgccagctttaaatggt

SEQ ID NO: 11868 - DNA, 18 bp, Homo sapiens
tgccaagtttcaaaagat

SEQ ID NO: 11869 - DNA, 19 bp, Homo sapiens
tgccaaattttaaatgtgt

SEQ ID NO: 11870 - DNA, 18 bp, Homo sapiens
tgccatctccagatgtgt

SEQ ID NO: 11871 - DNA, 18 bp, Homo sapiens
tgccaaattacggtgtgt

SEQ ID NO: 11872 - DNA, 19 bp, Homo sapiens
tgccaagtgttggacgtgt

SEQ ID NO: 11873 - DNA, 16 bp, Homo sapiens
taccaagtccttgtgt

SEQ ID NO: 11874 - DNA, 19 bp, Homo sapiens
ccaagtttcaagtatgtgt

SEQ ID NO: 11875 - DNA, 17 bp, Homo sapiens
tgcatttccagatgtgt

SEQ ID NO: 11876 - DNA, 18 bp, Homo sapiens
gccacaaaccagatgtgt

SEQ ID NO: 11877 - DNA, 17 bp, Homo sapiens
tgcagagacagatgtgt

SEQ ID NO: 11878 - DNA, 18 bp, Homo sapiens
tggcaagctcaagtgtgt

SEQ ID NO: 11879 - DNA, 17 bp, Homo sapiens
tgccaagtcccaagtgt

SEQ ID NO: 11880 - DNA, 18 bp, Homo sapiens
taccaaactaggatgtgt

SEQ ID NO: 11881 - DNA, 18 bp, Homo sapiens
taccatacaaagatgtgt

SEQ ID NO: 11882 - DNA, 16 bp, Homo sapiens
tgccaagtctgggtgt

SEQ ID NO: 11883 - DNA, 14 bp, Homo sapiens
tgccccagatgtgt

SEQ ID NO: 11884 - DNA, 20 bp, Homo sapiens
tgccaagtttctattagtgt

SEQ ID NO: 11885 - DNA, 18 bp, Homo sapiens
tgccaagtccttctgtgt

SEQ ID NO: 11886 - DNA, 15 bp, Homo sapiens
tgcagccagatgtgt

SEQ ID NO: 11887 - DNA, 126 bp, Cherry mottle leaf virus
gtggtattcaatgatttgaatttcagaagtgaaagttacccagtgagtgtcagggttgggaatatgtgcaggttctttgacagttttttgggttctgagattttcaagaatgaatcaaatgtctac

SEQ ID NO: 11888 - DNA, 24 bp, Cherry mottle leaf virus
tcaatgatttgaatttcagaagtg

SEQ ID NO: 11889 - DNA, 24 bp, Cherry mottle leaf virus
ttgacagttttttgggttctgaga

SEQ ID NO: 11890 - DNA, 22 bp, Homo sapiens
tcatgatttacattcagaggtg

SEQ ID NO: 11891 - DNA, 17 bp, Homo sapiens
tcaaggatttgaaacag

SEQ ID NO: 11892 - DNA, 18 bp, Homo sapiens
tcaaagatttgcagaggt

SEQ ID NO: 11893 - DNA, 23 bp, Homo sapiens
tcaaatgatttccttcagaggtg

SEQ ID NO: 11894 - DNA, 21 bp, Homo sapiens
tgactatgaatttcaggggtg

SEQ ID NO: 11895 - DNA, 72 bp, Cherry mottle leaf virus
gcctctgatctcatgatacattggaatgagtttgcattcaagatcatgcctgatgacattggggatggaggc

SEQ ID NO: 11896 - DNA, 24 bp, Cherry mottle leaf virus
atcatgcctgatgacattggggat

SEQ ID NO: 11897 - DNA, 24 bp, Cherry mottle leaf virus
tgatacattggaatgagtttgcat

SEQ ID NO: 11898 - DNA, 15 bp, Homo sapiens
catgcctggtgatgg

SEQ ID NO: 11899 - DNA, 18 bp, Homo sapiens
atcagtgcatgttgggga

SEQ ID NO: 11900 - DNA, 17 bp, Homo sapiens
tgcctgatggggtgggg

SEQ ID NO: 11901 - DNA, 17 bp, Homo sapiens
atgcctgatgagcgaag

SEQ ID NO: 11902 - DNA, 62 bp, Cherry mottle leaf virus
ctgccaattatgttcactggggggctttatcaatatcaattgatgcccttttcaaaaagcag

SEQ ID NO: 11903 - DNA, 19 bp, Cherry mottle leaf virus
tgcccttttcaaaaagcag

SEQ ID NO: 11904 - DNA, 24 bp, Cherry mottle leaf virus
actggggggctttatcaatatcaa

SEQ ID NO: 11905 - DNA, 18 bp, Homo sapiens
tgccacctcaaaaagcag

SEQ ID NO: 11906 - DNA, 15 bp, Homo sapiens
gccccccaaaggcag

SEQ ID NO: 11907 - DNA, 20 bp, Homo sapiens
tgccctttccacttacacag

SEQ ID NO: 11908 - DNA, 20 bp, Homo sapiens
tgcccttttcagaccctcag

SEQ ID NO: 11909 - DNA, 18 bp, Homo sapiens
tgcccttctgcccagcag

SEQ ID NO: 11910 - DNA, 20 bp, Homo sapiens
gcccctcgggcaggaagcag

SEQ ID NO: 11911 - DNA, 18 bp, Homo sapiens
cccccaggaaagaagcag

SEQ ID NO: 11912 - DNA, 19 bp, Homo sapiens
tgccctttttggtcagcag

SEQ ID NO: 11913 - DNA, 14 bp, Homo sapiens
taccctccaaagca

SEQ ID NO: 11914 - DNA, 16 bp, Homo sapiens
taccctttgcaagcag

SEQ ID NO: 11915 - DNA, 20 bp, Homo sapiens
ccctttccatgcaggagcag

SEQ ID NO: 11916 - DNA, 21 bp, Homo sapiens
tgccccttctcatcggggcag

SEQ ID NO: 11917 - DNA, 17 bp, Homo sapiens
tgccctttcaactgcag

SEQ ID NO: 11918 - DNA, 17 bp, Homo sapiens
tgccctcttgagagcag

SEQ ID NO: 11919 - DNA, 15 bp, Homo sapiens
gcctcacaaaagcag

SEQ ID NO: 11920 - DNA, 18 bp, Homo sapiens
cctttgaagaaaaagcag

SEQ ID NO: 11921 - DNA, 16 bp, Homo sapiens
tgctaccaaaaagcag

SEQ ID NO: 11922 - DNA, 16 bp, Homo sapiens
tgtcctctccaagcag

SEQ ID NO: 11923 - DNA, 16 bp, Homo sapiens
gccctctcagaagcag

SEQ ID NO: 11924 - DNA, 20 bp, Homo sapiens
tgcccttttccggggagcag

SEQ ID NO: 11925 - DNA, 18 bp, Homo sapiens
tgtccctttcatcaacag

SEQ ID NO: 11926 - DNA, 14 bp, Homo sapiens
tgccccttccagca

SEQ ID NO: 11927 - DNA, 17 bp, Homo sapiens
gctcccataaaaagcag

SEQ ID NO: 11928 - DNA, 20 bp, Homo sapiens
taccctttccacttgagcag

SEQ ID NO: 11929 - DNA, 17 bp, Homo sapiens
tgcacttttaaaagcag

SEQ ID NO: 11930 - DNA, 20 bp, Homo sapiens
cccttttccatctgaagcag

SEQ ID NO: 11931 - DNA, 18 bp, Homo sapiens
cccttctctaaggagcag

SEQ ID NO: 11932 - DNA, 15 bp, Homo sapiens
tgccccaaaaagcag

SEQ ID NO: 11933 - DNA, 19 bp, Homo sapiens
cttttcaagtctaaagcag

SEQ ID NO: 11934 - DNA, 19 bp, Homo sapiens
gcccaggacagaaaagcag

SEQ ID NO: 11935 - DNA, 14 bp, Homo sapiens
tgcccttctcagca

SEQ ID NO: 11936 - DNA, 17 bp, Homo sapiens
tgcaagtcaaaaagcag

SEQ ID NO: 11937 - DNA, 20 bp, Homo sapiens
tgctctcttcaaagaggcag

SEQ ID NO: 11938 - DNA, 18 bp, Homo sapiens
tgctctcttcaaacacag

SEQ ID NO: 11939 - DNA, 17 bp, Homo sapiens
tgcccctcctcaagcag

SEQ ID NO: 11940 - DNA, 20 bp, Homo sapiens
tgccccttcccaaggggcag

SEQ ID NO: 11941 - DNA, 18 bp, Homo sapiens
tgccctttttcaattcag

SEQ ID NO: 11942 - DNA, 18 bp, Homo sapiens
gcccctcccaaagggcag

SEQ ID NO: 11943 - DNA, 17 bp, Homo sapiens
tgcccttctcgaggcag

SEQ ID NO: 11944 - DNA, 17 bp, Homo sapiens
gctcttctcaaaggcag

SEQ ID NO: 11945 - DNA, 19 bp, Homo sapiens
tgccttttcactttaacag

SEQ ID NO: 11946 - DNA, 18 bp, Homo sapiens
gccctctctgggaagcag

SEQ ID NO: 11947 - DNA, 21 bp, Homo sapiens
tgccctttttaactcctgcag

SEQ ID NO: 11948 - DNA, 18 bp, Homo sapiens
cctgcttcaaaagggcag

SEQ ID NO: 11949 - DNA, 18 bp, Homo sapiens
gccctggctaaaaagcag

SEQ ID NO: 11950 - DNA, 14 bp, Homo sapiens
gcctcaaaaagcag

SEQ ID NO: 11951 - DNA, 16 bp, Homo sapiens
taccccccagaagcag

SEQ ID NO: 11952 - DNA, 14 bp, Homo sapiens
tgccctctaagcaa

SEQ ID NO: 11953 - DNA, 20 bp, Homo sapiens
gcccaccccccaagaagcag

SEQ ID NO: 11954 - DNA, 20 bp, Homo sapiens
tgctcctcccattaaggcag

SEQ ID NO: 11955 - DNA, 18 bp, Homo sapiens
gcccttttcttggagcag

SEQ ID NO: 11956 - DNA, 18 bp, Homo sapiens
tgccctttccaatctcag

SEQ ID NO: 11957 - DNA, 17 bp, Homo sapiens
tgcccttctttaaaaca

SEQ ID NO: 11958 - DNA, 19 bp, Homo sapiens
tgccttttcacctacgcag

SEQ ID NO: 11959 - DNA, 16 bp, Homo sapiens
tgcccttttaaaggca

SEQ ID NO: 11960 - DNA, 19 bp, Homo sapiens
tgccctttcaaaataacag

SEQ ID NO: 11961 - DNA, 75 bp, Macaca mulatta rhadinovirus
tggacaactactttttagcacaaatccagatatatcttcctttaaattgggtaccgaaggcgctgagtatttcca

SEQ ID NO: 11962 - DNA, 24 bp, Macaca mulatta rhadinovirus
tagcacaaatccagatatatcttc

SEQ ID NO: 11963 - DNA, 24 bp, Macaca mulatta rhadinovirus
aattgggtaccgaaggcgctgagt

SEQ ID NO: 11964 - DNA, 22 bp, Homo sapiens
tagcacaaatcaccatcaatat

SEQ ID NO: 11965 - DNA, 16 bp, Homo sapiens
gcacaggtcacatctt

SEQ ID NO: 11966 - DNA, 14 bp, Homo sapiens
gcacaaatctatct

SEQ ID NO: 11967 - DNA, 23 bp, Homo sapiens
agcccctcttcagatatattttc

SEQ ID NO: 11968 - DNA, 22 bp, Homo sapiens
gcactggttcaggcacaccttc

SEQ ID NO: 11969 - DNA, 21 bp, Homo sapiens
tagtccaaatccagacatttc

SEQ ID NO: 11970 - DNA, 18 bp, Homo sapiens
aattggatgttgaaggca

SEQ ID NO: 11971 - DNA, 131 bp, Macaca mulatta rhadinovirus
tgccaagaggacagataccagatgccataaaggggaaagagttccaccaaataaatccgtttttgtggtttgacggaggggcgttttggcaactgttcctctctgtggattttatgctgctctgtcccgca

SEQ ID NO: 11972 - DNA, 24 bp, Macaca mulatta rhadinovirus
aaggggaaagagttccaccaaata

SEQ ID NO: 11973 - DNA, 24 bp, Macaca mulatta rhadinovirus
tctgtggattttatgctgctctgt

SEQ ID NO: 11974 - DNA, 19 bp, Homo sapiens
tggattttataccacctgt

SEQ ID NO: 11975 - DNA, 21 bp, Homo sapiens
tctgggggtctcctgctctgt

SEQ ID NO: 11976 - DNA, 23 bp, Homo sapiens
tcttggattttgttgaaatctgt

SEQ ID NO: 11977 - DNA, 19 bp, Homo sapiens
tgtgaatttttgcttctgt

SEQ ID NO: 11978 - DNA, 70 bp, Macaca mulatta rhadinovirus
ggcttaaatatttaatgcaatgtaaaagcttatgcttttaagtctttaagctgcattatcttccattgcc

SEQ ID NO: 11979 - DNA, 24 bp, Macaca mulatta rhadinovirus
tttaatgcaatgtaaaagcttatg

SEQ ID NO: 11980 - DNA, 23 bp, Macaca mulatta rhadinovirus
aagctgcattatcttccattgcc

SEQ ID NO: 11981 - DNA, 18 bp, Homo sapiens
tttgatgcaatataaaaa

SEQ ID NO: 11982 - DNA, 21 bp, Homo sapiens
aacttttatttttccattgcc

SEQ ID NO: 11983 - DNA, 20 bp, Homo sapiens
aagatgcaactttccattgc

SEQ ID NO: 11984 - DNA, 15 bp, Homo sapiens
aagctgcactgtgcc

SEQ ID NO: 11985 - DNA, 20 bp, Homo sapiens
aagctggttatctccaggcc

SEQ ID NO: 11986 - DNA, 21 bp, Homo sapiens
aaactgcattatttcccttgc

SEQ ID NO: 11987 - DNA, 20 bp, Homo sapiens
gctgcactatttcaagagcc

SEQ ID NO: 11988 - DNA, 16 bp, Homo sapiens
agctgggtcccattgc

SEQ ID NO: 11989 - DNA, 18 bp, Homo sapiens
aagttgcagttccattgc

SEQ ID NO: 11990 - DNA, 16 bp, Homo sapiens
tgcattatcttctgcc

SEQ ID NO: 11991 - DNA, 21 bp, Homo sapiens
aagctactcacaattccattg

SEQ ID NO: 11992 - DNA, 18 bp, Homo sapiens
gctttaccatccattgcc

SEQ ID NO: 11993 - DNA, 24 bp, Homo sapiens
aacttgcaccatcatttcattgcc

SEQ ID NO: 11994 - DNA, 20 bp, Homo sapiens
agctggcattgtttccactg

SEQ ID NO: 11995 - DNA, 20 bp, Homo sapiens
agctgcactgtttatttgcc

SEQ ID NO: 11996 - DNA, 18 bp, Homo sapiens
aagctgcatttttcctgc

SEQ ID NO: 11997 - DNA, 86 bp, Macaca mulatta rhadinovirus
aaacaaggaatgcatatggttgcgacacccgggtacgtccgcgtttgttcgggtatacaccgcgaccactgcgcattctgccgttt

SEQ ID NO: 11998 - DNA, 24 bp, Macaca mulatta rhadinovirus
aggaatgcatatggttgcgacacc

SEQ ID NO: 11999 - DNA, 24 bp, Macaca mulatta rhadinovirus
ttcgggtatacaccgcgaccactg

SEQ ID NO: 12000 - DNA, 21 bp, Homo sapiens
gggcatacatctcatttgctg

SEQ ID NO: 12001 - DNA, 19 bp, Homo sapiens
gggtatacactgaagtctg

SEQ ID NO: 12002 - DNA, 84 bp, Macaca mulatta rhadinovirus
gttttggtaccctttctaatgcgccgaggagcgttccgatacccgggccgttgaacccacatccgcgagaaaccgtgcccgggc

SEQ ID NO: 12003 - DNA, 24 bp, Macaca mulatta rhadinovirus
taccctttctaatgcgccgaggag

SEQ ID NO: 12004 - DNA, 24 bp, Macaca mulatta rhadinovirus
cgttgaacccacatccgcgagaaa

SEQ ID NO: 12005 - DNA, 19 bp, Homo sapiens
cgttgaaccccattcgtga

SEQ ID NO: 12006 - DNA, 60 bp, Macaca mulatta rhadinovirus
tcccgtgtaccagtgtacctttctactatttaggttaagggtaaataaaggcacatgtaa

SEQ ID NO: 12007 - DNA, 24 bp, Macaca mulatta rhadinovirus
ttaagggtaaataaaggcacatgt

SEQ ID NO: 12008 - DNA, 24 bp, Macaca mulatta rhadinovirus
taccagtgtacctttctactattt

SEQ ID NO: 12009 - DNA, 18 bp, Homo sapiens
agggtgactggcacatgt

SEQ ID NO: 12010 - DNA, 24 bp, Homo sapiens
cagtgtcctttccagaaactattt

SEQ ID NO: 12011 - DNA, 19 bp, Homo sapiens
gtttacctttctattattt

SEQ ID NO: 12012 - DNA, 60 bp, Macaca mulatta rhadinovirus
ccaggtttacagtttctaagcgtgttttgtcatcgtttattttttaaactgaccaactgg

SEQ ID NO: 12013 - DNA, 24 bp, Macaca mulatta rhadinovirus
tacagtttctaagcgtgttttgtc

SEQ ID NO: 12014 - DNA, 24 bp, Macaca mulatta rhadinovirus
gtttattttttaaactgaccaact

SEQ ID NO: 12015 - DNA, 19 bp, Homo sapiens
cacagtttctaagcatgtc

SEQ ID NO: 12016 - DNA, 16 bp, Homo sapiens
tttctaactgttttgt

SEQ ID NO: 12017 - DNA, 20 bp, Homo sapiens
acagtttggcagtgttttgt

SEQ ID NO: 12018 - DNA, 21 bp, Homo sapiens
tacagtttttcatagtttgtc

SEQ ID NO: 12019 - DNA, 21 bp, Homo sapiens
tacgtttctttcttgttttgt

SEQ ID NO: 12020 - DNA, 24 bp, Homo sapiens
tgagtttctaggcccttattttgt

SEQ ID NO: 12021 - DNA, 16 bp, Homo sapiens
tacagcttctattttg

SEQ ID NO: 12022 - DNA, 20 bp, Homo sapiens
tacattctcctgtgttttgt

SEQ ID NO: 12023 - DNA, 22 bp, Homo sapiens
tacaatttctgagctgcactgt

SEQ ID NO: 12024 - DNA, 22 bp, Homo sapiens
gtttattttttaaactatcact

SEQ ID NO: 12025 - DNA, 22 bp, Homo sapiens
tttattttttagactgagggcc

SEQ ID NO: 12026 - DNA, 20 bp, Homo sapiens
gtttattttttaaactcaac

SEQ ID NO: 12027 - DNA, 18 bp, Homo sapiens
ttattttttaaaaaccaa

SEQ ID NO: 12028 - DNA, 69 bp, Macaca mulatta rhadinovirus
gacaattacatcttcttctctgcagataccgactactcagggggctcgagaaacggagatttaacggtc

SEQ ID NO: 12029 - DNA, 24 bp, Macaca mulatta rhadinovirus
gggctcgagaaacggagatttaac

SEQ ID NO: 12030 - DNA, 24 bp, Macaca mulatta rhadinovirus
aattacatcttcttctctgcagat

SEQ ID NO: 12031 - DNA, 15 bp, Homo sapiens
gggctcaggagactc

SEQ ID NO: 12032 - DNA, 24 bp, Homo sapiens
aattacatttattacaaagcagat

SEQ ID NO: 12033 - DNA, 18 bp, Homo sapiens
ttacatctcactgcagat

SEQ ID NO: 12034 - DNA, 60 bp, Macaca mulatta rhadinovirus
ccgctcctgacgcgattgacctggaaccgtttacagaagatgtcccaggttgatttccag

SEQ ID NO: 12035 - DNA, 20 bp, Macaca mulatta rhadinovirus
tgtcccaggttgatttccag

SEQ ID NO: 12036 - DNA, 24 bp, Macaca mulatta rhadinovirus
tgacgcgattgacctggaaccgtt

SEQ ID NO: 12037 - DNA, 16 bp, Homo sapiens
tcccaggtgtctccag

SEQ ID NO: 12038 - DNA, 18 bp, Homo sapiens
tcccaggttagagcccag

SEQ ID NO: 12039 - DNA, 18 bp, Homo sapiens
tggcccagactcttccag

SEQ ID NO: 12040 - DNA, 18 bp, Homo sapiens
gtcttgtaaaatttccag

SEQ ID NO: 12041 - DNA, 18 bp, Homo sapiens
tgttccggttaactccag

SEQ ID NO: 12042 - DNA, 20 bp, Homo sapiens
tgtcccagattactctccag

SEQ ID NO: 12043 - DNA, 18 bp, Homo sapiens
tgtccaggtgtggtccag

SEQ ID NO: 12044 - DNA, 14 bp, Homo sapiens
tgtccaggttgtcc

SEQ ID NO: 12045 - DNA, 14 bp, Homo sapiens
tgccccaggtccca

SEQ ID NO: 12046 - DNA, 16 bp, Homo sapiens
tcacctcgatttccag

SEQ ID NO: 12047 - DNA, 19 bp, Homo sapiens
tgcttgggctcatttccag

SEQ ID NO: 12048 - DNA, 16 bp, Homo sapiens
atcccaggagttccag

SEQ ID NO: 12049 - DNA, 17 bp, Homo sapiens
tgttcctggttttccag

SEQ ID NO: 12050 - DNA, 20 bp, Homo sapiens
tgtcccaggatcacatccag

SEQ ID NO: 12051 - DNA, 18 bp, Homo sapiens
tgtcccagactcatccag

SEQ ID NO: 12052 - DNA, 17 bp, Homo sapiens
tcctgtatcatttccag

SEQ ID NO: 12053 - DNA, 16 bp, Homo sapiens
tcccgcttgtttccag

SEQ ID NO: 12054 - DNA, 17 bp, Homo sapiens
tgtcccaggctgcacag

SEQ ID NO: 12055 - DNA, 15 bp, Homo sapiens
tgccccagggatcca

SEQ ID NO: 12056 - DNA, 19 bp, Homo sapiens
tgcttcgggggatctccag

SEQ ID NO: 12057 - DNA, 14 bp, Homo sapiens
tgccccaggtctcc

SEQ ID NO: 12058 - DNA, 16 bp, Homo sapiens
tcccaggtctgtccag

SEQ ID NO: 12059 - DNA, 16 bp, Homo sapiens
tgtcccaggctgggcc

SEQ ID NO: 12060 - DNA, 19 bp, Homo sapiens
tgtcccaggtgccgacccc

SEQ ID NO: 12061 - DNA, 19 bp, Homo sapiens
tgcccaggttgttaagcag

SEQ ID NO: 12062 - DNA, 18 bp, Homo sapiens
gtcccaggtccccaccag

SEQ ID NO: 12063 - DNA, 17 bp, Homo sapiens
tcccgggtcagccccag

SEQ ID NO: 12064 - DNA, 17 bp, Homo sapiens
tgctcagttatttccag

SEQ ID NO: 12065 - DNA, 19 bp, Homo sapiens
tggcccaggccatcttcag

SEQ ID NO: 12066 - DNA, 14 bp, Homo sapiens
tcccagatttccag

SEQ ID NO: 12067 - DNA, 20 bp, Homo sapiens
tgttacagggctatttccag

SEQ ID NO: 12068 - DNA, 16 bp, Homo sapiens
tgtcccagtcctgccc

SEQ ID NO: 12069 - DNA, 17 bp, Homo sapiens
tatcttttgatttccag

SEQ ID NO: 12070 - DNA, 16 bp, Homo sapiens
tccaaagaatttccag

SEQ ID NO: 12071 - DNA, 20 bp, Homo sapiens
tgccccaggtcctccctcag

SEQ ID NO: 12072 - DNA, 15 bp, Homo sapiens
tgtcccaaggctcca

SEQ ID NO: 12073 - DNA, 19 bp, Homo sapiens
tgtcccagaatccttccag

SEQ ID NO: 12074 - DNA, 17 bp, Homo sapiens
tgtccgggtcgcaccag

SEQ ID NO: 12075 - DNA, 17 bp, Homo sapiens
tcccagatcctttccag

SEQ ID NO: 12076 - DNA, 22 bp, Homo sapiens
tgtcccaaggtgtgcggtccag

SEQ ID NO: 12077 - DNA, 20 bp, Homo sapiens
tgccccagcccgctgtttcc

SEQ ID NO: 12078 - DNA, 17 bp, Homo sapiens
gttcctggaatttccag

SEQ ID NO: 12079 - DNA, 18 bp, Homo sapiens
tgtcctctaagtttccag

SEQ ID NO: 12080 - DNA, 17 bp, Homo sapiens
tgtctcagtacctccag

SEQ ID NO: 12081 - DNA, 17 bp, Homo sapiens
tgcctcagaacttccag

SEQ ID NO: 12082 - DNA, 17 bp, Homo sapiens
tgtcccagcttcctccc

SEQ ID NO: 12083 - DNA, 63 bp, Macaca mulatta rhadinovirus
acgcccaaactcatcctggagtgcaaaaatctggatcttacaacacgagttcatccaattcca

SEQ ID NO: 12084 - DNA, 18 bp, Macaca mulatta rhadinovirus
cgagttcatccaattcca

SEQ ID NO: 12085 - DNA, 24 bp, Macaca mulatta rhadinovirus
cccaaactcatcctggagtgcaaa

SEQ ID NO: 12086 - DNA, 15 bp, Homo sapiens
cgagttcactttcca

SEQ ID NO: 12087 - DNA, 22 bp, Homo sapiens
cgagttcaatgaagacattcca

SEQ ID NO: 12088 - DNA, 15 bp, Homo sapiens
cgagctccaattcca

SEQ ID NO: 12089 - DNA, 18 bp, Homo sapiens
ccagttcatctgtctcca

SEQ ID NO: 12090 - DNA, 18 bp, Homo sapiens
gagttggccccaattcca

SEQ ID NO: 12091 - DNA, 18 bp, Homo sapiens
cgagtccacggcagttcc

SEQ ID NO: 12092 - DNA, 18 bp, Homo sapiens
cgagtaaccccaattcca

SEQ ID NO: 12093 - DNA, 21 bp, Homo sapiens
gagttcacattgattcaattc

SEQ ID NO: 12094 - DNA, 18 bp, Homo sapiens
cgagtccagcaatcttcc

SEQ ID NO: 12095 - DNA, 20 bp, Homo sapiens
gaattcacattttgattcca

SEQ ID NO: 12096 - DNA, 16 bp, Homo sapiens
cgtgctcccaattcca

SEQ ID NO: 12097 - DNA, 17 bp, Homo sapiens
ccagccatccaatttca

SEQ ID NO: 12098 - DNA, 20 bp, Homo sapiens
gagctcacagctgaattcca

SEQ ID NO: 12099 - DNA, 16 bp, Homo sapiens
caagctcccaattcca

SEQ ID NO: 12100 - DNA, 14 bp, Homo sapiens
caagttcaattcca

SEQ ID NO: 12101 - DNA, 18 bp, Homo sapiens
cgtggacacccaattcca

SEQ ID NO: 12102 - DNA, 16 bp, Homo sapiens
cgaattcacaactcca

SEQ ID NO: 12103 - DNA, 19 bp, Homo sapiens
cccaatttcaacagtgcaa

SEQ ID NO: 12104 - DNA, 18 bp, Homo sapiens
cccaaactgatctttaca

SEQ ID NO: 12105 - DNA, 19 bp, Homo sapiens
ccaaactcagcttgctaca

SEQ ID NO: 12106 - DNA, 18 bp, Homo sapiens
ccccggcttggagtgcaa

SEQ ID NO: 12107 - DNA, 22 bp, Homo sapiens
cccaaattcattttctctgtag

SEQ ID NO: 12108 - DNA, 14 bp, Homo sapiens
ccacacctggagtg

SEQ ID NO: 12109 - DNA, 22 bp, Homo sapiens
cccaaagttcatctttaattgc

SEQ ID NO: 12110 - DNA, 19 bp, Homo sapiens
cccgagctctggaagtgca

SEQ ID NO: 12111 - DNA, 19 bp, Homo sapiens
aaactcatgtccatggcag

SEQ ID NO: 12112 - DNA, 17 bp, Homo sapiens
ccaactcatcttgaata

SEQ ID NO: 12113 - DNA, 17 bp, Homo sapiens
cccagactcatccagaa

SEQ ID NO: 12114 - DNA, 16 bp, Homo sapiens
caaactcatggtgcaa

SEQ ID NO: 12115 - DNA, 23 bp, Homo sapiens
ccacaaactcagtaggagtgcaa

SEQ ID NO: 12116 - DNA, 20 bp, Homo sapiens
cctagcctcatcctgcagca

SEQ ID NO: 12117 - DNA, 18 bp, Homo sapiens
aactccaaagagtgcaaa

SEQ ID NO: 12118 - DNA, 22 bp, Homo sapiens
cccaggactaaggcggagtgca

SEQ ID NO: 12119 - DNA, 18 bp, Homo sapiens
cccacactcatccggcag

SEQ ID NO: 12120 - DNA, 22 bp, Homo sapiens
cccaaagtttgtctcctgtaag

SEQ ID NO: 12121 - DNA, 17 bp, Homo sapiens
caaactcattatttgca

SEQ ID NO: 12122 - DNA, 21 bp, Homo sapiens
cccagagtcatcccctcagcg

SEQ ID NO: 12123 - DNA, 21 bp, Homo sapiens
cccaaactatatttttacaaa

SEQ ID NO: 12124 - DNA, 18 bp, Homo sapiens
cccaggccatcctgagcg

SEQ ID NO: 12125 - DNA, 20 bp, Homo sapiens
caaactcattcttggccttg

SEQ ID NO: 12126 - DNA, 16 bp, Homo sapiens
cccaaagtcaggtgca

SEQ ID NO: 12127 - DNA, 20 bp, Homo sapiens
cccaaactcatctgaccaca

SEQ ID NO: 12128 - DNA, 19 bp, Homo sapiens
cccagcctcatcctgtaag

SEQ ID NO: 12129 - DNA, 18 bp, Homo sapiens
cctgaactcatcttgaag

SEQ ID NO: 12130 - DNA, 19 bp, Homo sapiens
cccaaagtcatttagaatg

SEQ ID NO: 12131 - DNA, 18 bp, Homo sapiens
cccaaattcagagtgcaa

SEQ ID NO: 12132 - DNA, 18 bp, Homo sapiens
cccaaactgtccttaata

SEQ ID NO: 12133 - DNA, 18 bp, Homo sapiens
caaactcatctaaatgta

SEQ ID NO: 12134 - DNA, 20 bp, Homo sapiens
cccagggtcactagagtgca

SEQ ID NO: 12135 - DNA, 19 bp, Homo sapiens
cctgactcatccacggcag

SEQ ID NO: 12136 - DNA, 69 bp, Macaca mulatta rhadinovirus
agcccgggttttgtttcaagcacaaaacaaaagagagatagctttgtggagagctatcccttcaaagcc

SEQ ID NO: 12137 - DNA, 24 bp, Macaca mulatta rhadinovirus
gttttgtttcaagcacaaaacaaa

SEQ ID NO: 12138 - DNA, 20 bp, Macaca mulatta rhadinovirus
agagctatcccttcaaagcc

SEQ ID NO: 12139 - DNA, 19 bp, Homo sapiens
ttaacccgagcacaaaaca

SEQ ID NO: 12140 - DNA, 17 bp, Homo sapiens
ttttggtaagcacaaaa

SEQ ID NO: 12141 - DNA, 19 bp, Homo sapiens
gttttttaaacacaaaaca

SEQ ID NO: 12142 - DNA, 22 bp, Homo sapiens
gttatgtttatcacaaaacaaa

SEQ ID NO: 12143 - DNA, 27 bp, Homo sapiens
attttgtttcagtcacattgaaacaaa

SEQ ID NO: 12144 - DNA, 27 bp, Homo sapiens
attttgtttcagtcacactgaaacaaa

SEQ ID NO: 12145 - DNA, 18 bp, Homo sapiens
cctcaagcataaagcaaa

SEQ ID NO: 12146 - DNA, 21 bp, Homo sapiens
ttttcttttaagcacaaagca

SEQ ID NO: 12147 - DNA, 18 bp, Homo sapiens
tttgtttcagagcggcaa

SEQ ID NO: 12148 - DNA, 21 bp, Homo sapiens
attttgttaaaacaaaacaaa

SEQ ID NO: 12149 - DNA, 18 bp, Homo sapiens
gctttgtttcatgaaaca

SEQ ID NO: 12150 - DNA, 20 bp, Homo sapiens
gcacattcaagcacagaaca

SEQ ID NO: 12151 - DNA, 19 bp, Homo sapiens
tgctttcaagcataaaaca

SEQ ID NO: 12152 - DNA, 18 bp, Homo sapiens
tgcttaagtacaaaacaa

SEQ ID NO: 12153 - DNA, 15 bp, Homo sapiens
aaagctatgcaaagc

SEQ ID NO: 12154 - DNA, 18 bp, Homo sapiens
gaacctgccttcaaagcc

SEQ ID NO: 12155 - DNA, 14 bp, Homo sapiens
agagcttccaaagc

SEQ ID NO: 12156 - DNA, 17 bp, Homo sapiens
gagccatctccacagcc

SEQ ID NO: 12157 - DNA, 14 bp, Homo sapiens
gagcttctcaaagc

SEQ ID NO: 12158 - DNA, 20 bp, Homo sapiens
ggatcacctttttcaaagcc

SEQ ID NO: 12159 - DNA, 23 bp, Homo sapiens
agagctgccaaaacctcaaggcc

SEQ ID NO: 12160 - DNA, 20 bp, Homo sapiens
agttatccccctgacaagcc

SEQ ID NO: 12161 - DNA, 20 bp, Homo sapiens
aactaaccccctttagggcc

SEQ ID NO: 12162 - DNA, 17 bp, Homo sapiens
aaagctaccttaaagcc

SEQ ID NO: 12163 - DNA, 17 bp, Homo sapiens
agaaactctcttcaaag

SEQ ID NO: 12164 - DNA, 16 bp, Homo sapiens
aaagcatcttcaaagc

SEQ ID NO: 12165 - DNA, 17 bp, Homo sapiens
agagctaccactgagcc

SEQ ID NO: 12166 - DNA, 15 bp, Homo sapiens
gacctatccctaagc

SEQ ID NO: 12167 - DNA, 15 bp, Homo sapiens
aggctttctcaaagc

SEQ ID NO: 12168 - DNA, 14 bp, Homo sapiens
agagccaccaaagc

SEQ ID NO: 12169 - DNA, 20 bp, Homo sapiens
agagttaccataccaaagcc

SEQ ID NO: 12170 - DNA, 16 bp, Homo sapiens
aaagctaacttcaaag

SEQ ID NO: 12171 - DNA, 16 bp, Homo sapiens
gagctaccaacccagc

SEQ ID NO: 12172 - DNA, 21 bp, Homo sapiens
agagcatccccccggcgggcc

SEQ ID NO: 12173 - DNA, 19 bp, Homo sapiens
aggcctgtcccctcacagc

SEQ ID NO: 12174 - DNA, 18 bp, Homo sapiens
agagtcatctcttcaagc

SEQ ID NO: 12175 - DNA, 15 bp, Homo sapiens
agagttatcccttgc

SEQ ID NO: 12176 - DNA, 15 bp, Homo sapiens
gagactatccaaagc

SEQ ID NO: 12177 - DNA, 20 bp, Homo sapiens
gagggagacccttcaaagcc

SEQ ID NO: 12178 - DNA, 19 bp, Homo sapiens
agaggtagccttcaaagcc

SEQ ID NO: 12179 - DNA, 23 bp, Homo sapiens
agagctatcctgctctttaaagc

SEQ ID NO: 12180 - DNA, 18 bp, Homo sapiens
aggctcatgttcaaagcc

SEQ ID NO: 12181 - DNA, 17 bp, Homo sapiens
aggctgtgcccaaagcc

SEQ ID NO: 12182 - DNA, 17 bp, Homo sapiens
aggctacctcttcaaag

SEQ ID NO: 12183 - DNA, 21 bp, Homo sapiens
agagctactacagccggagcc

SEQ ID NO: 12184 - DNA, 19 bp, Homo sapiens
gagccatcccgagggagcc

SEQ ID NO: 12185 - DNA, 21 bp, Homo sapiens
agaactatctcttataacagc

SEQ ID NO: 12186 - DNA, 20 bp, Homo sapiens
acagtcccagattcaaagcc

SEQ ID NO: 12187 - DNA, 21 bp, Homo sapiens
agagctatcattttagaaagc

SEQ ID NO: 12188 - DNA, 20 bp, Homo sapiens
aaagctatctcttcagtgcc

SEQ ID NO: 12189 - DNA, 14 bp, Homo sapiens
agagctaccaaagc

SEQ ID NO: 12190 - DNA, 14 bp, Homo sapiens
aggctcctcaaagc

SEQ ID NO: 12191 - DNA, 18 bp, Homo sapiens
gctgttcactccaaagcc

SEQ ID NO: 12192 - DNA, 20 bp, Homo sapiens
agagctacgcgctccagggc

SEQ ID NO: 12193 - DNA, 18 bp, Homo sapiens
agaggtgtccctccagcc

SEQ ID NO: 12194 - DNA, 15 bp, Homo sapiens
agggctatccaaagc

SEQ ID NO: 12195 - DNA, 91 bp, Monkeypox virus
tacatttttctatgttacttttagttcgtatcagattatattctagagcttcctgactactaacgaaattaatatgatttggccaaatgta

SEQ ID NO: 12196 - DNA, 24 bp, Monkeypox virus
tctatgttacttttagttcgtatc

SEQ ID NO: 12197 - DNA, 24 bp, Monkeypox virus
taacgaaattaatatgatttggcc

SEQ ID NO: 12198 - DNA, 20 bp, Homo sapiens
gaaattaaaaataaatggcc

SEQ ID NO: 12199 - DNA, 16 bp, Homo sapiens
gaaattaaactttggc

SEQ ID NO: 12200 - DNA, 15 bp, Homo sapiens
gaaagtatgatttgg

SEQ ID NO: 12201 - DNA, 18 bp, Homo sapiens
taataaaattaatatgat

SEQ ID NO: 12202 - DNA, 91 bp, Simian immunodeficiency virus
gctgggcctaattacgctgtccgcctgttccacgcgcgtgtcggctacgacacgctggagcagcttccacgcgacagatccgtctctcagc

SEQ ID NO: 12203 - DNA, 24 bp, Simian immunodeficiency virus
acgctgtccgcctgttccacgcgc

SEQ ID NO: 12204 - DNA, 24 bp, Simian immunodeficiency virus
cacgctggagcagcttccacgcga

SEQ ID NO: 12205 - DNA, 20 bp, Homo sapiens
ctgtccgcccgcccgcgcgc

SEQ ID NO: 12206 - DNA, 16 bp, Homo sapiens
acgcgtccgcccacgc

SEQ ID NO: 12207 - DNA, 17 bp, Homo sapiens
ctgtctgcggttccacg

SEQ ID NO: 12208 - DNA, 18 bp, Homo sapiens
gctgtccgtctgtctcgc

SEQ ID NO: 12209 - DNA, 21 bp, Homo sapiens
cgctgtccgccctgtgggtgc

SEQ ID NO: 12210 - DNA, 17 bp, Homo sapiens
cgctgtctgtctctgcg

SEQ ID NO: 12211 - DNA, 18 bp, Homo sapiens
gctgtctgtctgtcctgc

SEQ ID NO: 12212 - DNA, 63 bp, Simian immunodeficiency virus
ggctgacaggatcgtccccttggctcgtgatcctacaagggcagggggggtctctgttctgcc

SEQ ID NO: 12213 - DNA, 24 bp, Simian immunodeficiency virus
tgacaggatcgtccccttggctcg

SEQ ID NO: 12214 - DNA, 24 bp, Simian immunodeficiency virus
gggcagggggggtctctgttctgc

SEQ ID NO: 12215 - DNA, 19 bp, Homo sapiens
tgataggatcgcccccttg

SEQ ID NO: 12216 - DNA, 21 bp, Homo sapiens
tgacaggatttttccatgttg

SEQ ID NO: 12217 - DNA, 19 bp, Homo sapiens
acagccactctttggctcg

SEQ ID NO: 12218 - DNA, 69 bp, Simian immunodeficiency virus
cgtgccgggaccccgacaaggccttcttgccgacattactggcgagaagcgcccgacgcggcctggccg

SEQ ID NO: 12219 - DNA, 24 bp, Simian immunodeficiency virus
cgagaagcgcccgacgcggcctgg

SEQ ID NO: 12220 - DNA, 24 bp, Simian immunodeficiency virus
tgccgggaccccgacaaggccttc

SEQ ID NO: 12221 - DNA, 20 bp, Homo sapiens
gaggtgctcaggcagcctgg

SEQ ID NO: 12222 - DNA, 22 bp, Homo sapiens
cgagaagcgccccgcgtccccg

SEQ ID NO: 12223 - DNA, 16 bp, Homo sapiens
cgagagcgcccggcgg

SEQ ID NO: 12224 - DNA, 21 bp, Homo sapiens
cgggagcgaggagcggcctgg

SEQ ID NO: 12225 - DNA, 21 bp, Homo sapiens
cggggagcatctacggcctgg

SEQ ID NO: 12226 - DNA, 21 bp, Homo sapiens
gagaagcaccgtggggcctgg

SEQ ID NO: 12227 - DNA, 16 bp, Homo sapiens
cgagaagcacccgcct

SEQ ID NO: 12228 - DNA, 21 bp, Homo sapiens
cgggaagcctcgcgcgcctgg

SEQ ID NO: 12229 - DNA, 18 bp, Homo sapiens
aggggcgctcgcggcctg

SEQ ID NO: 12230 - DNA, 18 bp, Homo sapiens
gaggggcgctccggcctg

SEQ ID NO: 12231 - DNA, 20 bp, Homo sapiens
agaagcgcctgacttactgg

SEQ ID NO: 12232 - DNA, 17 bp, Homo sapiens
cgaggcgccgcggcctg

SEQ ID NO: 12233 - DNA, 22 bp, Homo sapiens
gagaggcgtccctgcagcctgg

SEQ ID NO: 12234 - DNA, 19 bp, Homo sapiens
gaagtgctacacagcctgg

SEQ ID NO: 12235 - DNA, 21 bp, Homo sapiens
cggggagcgcgggcggcctgg

SEQ ID NO: 12236 - DNA, 20 bp, Homo sapiens
gaggcgggtcagcggcctgg

SEQ ID NO: 12237 - DNA, 21 bp, Homo sapiens
gagaagccctgggcagcctgg

SEQ ID NO: 12238 - DNA, 22 bp, Homo sapiens
cgggaacgcccgactggcctgg

SEQ ID NO: 12239 - DNA, 16 bp, Homo sapiens
tgccgggatccgggcc

SEQ ID NO: 12240 - DNA, 18 bp, Homo sapiens
gctgggtcgcaaggcctt

SEQ ID NO: 12241 - DNA, 22 bp, Homo sapiens
tgctggggccatgaaggccttc

SEQ ID NO: 12242 - DNA, 20 bp, Homo sapiens
gctgggacccctcagccttc

SEQ ID NO: 12243 - DNA, 18 bp, Homo sapiens
tgctgtgggccaggcctt

SEQ ID NO: 12244 - DNA, 17 bp, Homo sapiens
taccgggataagggctt

SEQ ID NO: 12245 - DNA, 20 bp, Homo sapiens
tgctggggtcccgaggtggc

SEQ ID NO: 12246 - DNA, 19 bp, Homo sapiens
gggaaaaaacaaggctttc

SEQ ID NO: 12247 - DNA, 80 bp, Simian immunodeficiency virus
ctgcatctgggatcgcgctcggagctctcccaccccgtgttggagtgggagagcacagagctggtcctgacggactggag

SEQ ID NO: 12248 - DNA, 24 bp, Simian immunodeficiency virus
tgggatcgcgctcggagctctccc

SEQ ID NO: 12249 - DNA, 24 bp, Simian immunodeficiency virus
ggagagcacagagctggtcctgac

SEQ ID NO: 12250 - DNA, 19 bp, Homo sapiens
tgggatcgtggcgctttcc

SEQ ID NO: 12251 - DNA, 14 bp, Homo sapiens
ggatcgcagctctc

SEQ ID NO: 12252 - DNA, 28 bp, Homo sapiens
tgggatcacgtttcttctgggagagctc

SEQ ID NO: 12253 - DNA, 16 bp, Homo sapiens
tgggacgcgggctctc

SEQ ID NO: 12254 - DNA, 21 bp, Homo sapiens
tggggtccagacagagctctc

SEQ ID NO: 12255 - DNA, 22 bp, Homo sapiens
gaagagcacggaggggaacctg

SEQ ID NO: 12256 - DNA, 22 bp, Homo sapiens
ggagagccagggagagactgac

SEQ ID NO: 12257 - DNA, 17 bp, Homo sapiens
ggggctgcagagctggc

SEQ ID NO: 12258 - DNA, 18 bp, Homo sapiens
gaggagcacagggctggc

SEQ ID NO: 12259 - DNA, 24 bp, Homo sapiens
ggagggcatggaactggcctcctg

SEQ ID NO: 12260 - DNA, 18 bp, Homo sapiens
ggagaacatggagctggc

SEQ ID NO: 12261 - DNA, 19 bp, Homo sapiens
ggaagcacaggatatctga

SEQ ID NO: 12262 - DNA, 19 bp, Homo sapiens
ggagggctcggggtcctga

SEQ ID NO: 12263 - DNA, 20 bp, Homo sapiens
ggagagcactgtgattctga

SEQ ID NO: 12264 - DNA, 18 bp, Homo sapiens
gggaagcactggtcctga

SEQ ID NO: 12265 - DNA, 17 bp, Homo sapiens
ggagagcaggtctcctg

SEQ ID NO: 12266 - DNA, 21 bp, Homo sapiens
gggagcatggggctgggggac

SEQ ID NO: 12267 - DNA, 17 bp, Homo sapiens
ggcagagccaggctggc

SEQ ID NO: 12268 - DNA, 22 bp, Homo sapiens
ggagagcagtggtgcaatcttg

SEQ ID NO: 12269 - DNA, 21 bp, Homo sapiens
gggagcacaggtgcttctggc

SEQ ID NO: 12270 - DNA, 18 bp, Homo sapiens
ggagagcagtggctcctg

SEQ ID NO: 12271 - DNA, 19 bp, Homo sapiens
ggggacacagagttctggc

SEQ ID NO: 12272 - DNA, 18 bp, Homo sapiens
gagagcacagctgtcctg

SEQ ID NO: 12273 - DNA, 22 bp, Homo sapiens
ggtgagcacaggagcacccctg

SEQ ID NO: 12274 - DNA, 23 bp, Homo sapiens
ggagggctcagagctggaggaga

SEQ ID NO: 12275 - DNA, 22 bp, Homo sapiens
ggagagggtggggggccctgac

SEQ ID NO: 12276 - DNA, 20 bp, Homo sapiens
ggaatgatcagctggtcctg

SEQ ID NO: 12277 - DNA, 22 bp, Homo sapiens
gaggggtgcagagccatacctg

SEQ ID NO: 12278 - DNA, 18 bp, Homo sapiens
gggagacagagctgtctg

SEQ ID NO: 12279 - DNA, 19 bp, Homo sapiens
gaagggcacagagcgtggc

SEQ ID NO: 12280 - DNA, 22 bp, Homo sapiens
gagaacgcatgagctggtcctg

SEQ ID NO: 12281 - DNA, 19 bp, Homo sapiens
ggagagctggagaactggc

SEQ ID NO: 12282 - DNA, 18 bp, Homo sapiens
ggagagcaggaggctgat

SEQ ID NO: 12283 - DNA, 66 bp, Simian immunodeficiency virus
gcgggggggcgacgcagacgtacggcggcagaggccgacatgattcctgcccgtcgatccccctgt

SEQ ID NO: 12284 - DNA, 24 bp, Simian immunodeficiency virus
cgacatgattcctgcccgtcgatc

SEQ ID NO: 12285 - DNA, 24 bp, Simian immunodeficiency virus
acgcagacgtacggcggcagaggc

SEQ ID NO: 12286 - DNA, 18 bp, Homo sapiens
gacatgattcctcctgtc

SEQ ID NO: 12287 - DNA, 21 bp, Homo sapiens
cgacatgattctgaaggtgat

SEQ ID NO: 12288 - DNA, 20 bp, Homo sapiens
acccaggcaggcggcagagg

SEQ ID NO: 12289 - DNA, 19 bp, Homo sapiens
gcagacggcgcacagaggc

SEQ ID NO: 12290 - DNA, 17 bp, Homo sapiens
cgcagacgtgggtgaca

SEQ ID NO: 12291 - DNA, 22 bp, Homo sapiens
acgcgggcgcacggcagaaggc

SEQ ID NO: 12292 - DNA, 19 bp, Homo sapiens
gcggcgacggcggcggggg

SEQ ID NO: 12293 - DNA, 21 bp, Homo sapiens
gcgggcgacggcagcccaggc

SEQ ID NO: 12294 - DNA, 19 bp, Homo sapiens
gctgggcgtggggcagagg

SEQ ID NO: 12295 - DNA, 21 bp, Homo sapiens
cgcgggcgctggagcggaggc

SEQ ID NO: 12296 - DNA, 20 bp, Homo sapiens
cgtcagagtgtggcagaggc

SEQ ID NO: 12297 - DNA, 22 bp, Homo sapiens
gcagacatgcgcctggcggggg

SEQ ID NO: 12298 - DNA, 17 bp, Homo sapiens
gacggcgtcggcagagg

SEQ ID NO: 12299 - DNA, 18 bp, Homo sapiens
gacgctggcggcaggggc

SEQ ID NO: 12300 - DNA, 24 bp, Homo sapiens
cgcagcacggcacagggcaggggc

SEQ ID NO: 12301 - DNA, 22 bp, Homo sapiens
gcaaggtctgtggcggcagagg

SEQ ID NO: 12302 - DNA, 23 bp, Homo sapiens
gcgggcgtcagggcggcaggggc

SEQ ID NO: 12303 - DNA, 19 bp, Homo sapiens
gctccgcggcggcagaggc

SEQ ID NO: 12304 - DNA, 20 bp, Homo sapiens
cgacaggcgctggcggaggc

SEQ ID NO: 12305 - DNA, 20 bp, Homo sapiens
cgcgcgcaggcggcaggggc

SEQ ID NO: 12306 - DNA, 20 bp, Homo sapiens
cgcggacggctgacagaggc

SEQ ID NO: 12307 - DNA, 21 bp, Homo sapiens
cgggggcgctgcggcagaggc

SEQ ID NO: 12308 - DNA, 22 bp, Homo sapiens
gcagggagcacgtggcagaggc

SEQ ID NO: 12309 - DNA, 17 bp, Homo sapiens
gcaggtctgagcagagg

SEQ ID NO: 12310 - DNA, 18 bp, Homo sapiens
cgcagacgggcccagggg

SEQ ID NO: 12311 - DNA, 22 bp, Homo sapiens
cgcgacaacaagcggcggaggc

SEQ ID NO: 12312 - DNA, 24 bp, Homo sapiens
acgcggcgcgggcggcggcggagg

SEQ ID NO: 12313 - DNA, 22 bp, Homo sapiens
acacggggcaggtggcagaggc

SEQ ID NO: 12314 - DNA, 17 bp, Homo sapiens
gcagatgcaggcagagg

SEQ ID NO: 12315 - DNA, 18 bp, Homo sapiens
gcgggacgttggcagagg

SEQ ID NO: 12316 - DNA, 21 bp, Homo sapiens
cgcggactttccggcagaggc

SEQ ID NO: 12317 - DNA, 73 bp, Simian immunodeficiency virus
cctctgccaccgatgacgcccgtcgacgacgagccgtccgtccgccctcggtgtccgccaggtcccgcggagg

SEQ ID NO: 12318 - DNA, 24 bp, Simian immunodeficiency virus
tccgtccgccctcggtgtccgcca

SEQ ID NO: 12319 - DNA, 24 bp, Simian immunodeficiency virus
gatgacgcccgtcgacgacgagcc

SEQ ID NO: 12320 - DNA, 22 bp, Homo sapiens
cctgtccgtcgtccgtccgtca

SEQ ID NO: 12321 - DNA, 18 bp, Homo sapiens
tctgccctcggttcgcca

SEQ ID NO: 12322 - DNA, 17 bp, Homo sapiens
tcagtccgcccgtccgc

SEQ ID NO: 12323 - DNA, 22 bp, Homo sapiens
tccgtctgcccgcctgctcgcc

SEQ ID NO: 12324 - DNA, 21 bp, Homo sapiens
tccgcccgcccgggatccgcc

SEQ ID NO: 12325 - DNA, 16 bp, Homo sapiens
tccctccgccctccgc

SEQ ID NO: 12326 - DNA, 23 bp, Homo sapiens
tccgtcagtccgtccgtccgcca

SEQ ID NO: 12327 - DNA, 16 bp, Homo sapiens
gccacagcgacgagcc

SEQ ID NO: 12328 - DNA, 72 bp, Simian immunodeficiency virus
cgacatctgaggctcatacttaatctatcagacggtgttgtctgaaagattattacctctgagaggatatcg

SEQ ID NO: 12329 - DNA, 24 bp, Simian immunodeficiency virus
tgaaagattattacctctgagagg

SEQ ID NO: 12330 - DNA, 24 bp, Simian immunodeficiency virus
tcatacttaatctatcagacggtg

SEQ ID NO: 12331 - DNA, 19 bp, Homo sapiens
tcatacttaagctattcag

SEQ ID NO: 12332 - DNA, 20 bp, Homo sapiens
atacttaatttaccaatgtg

SEQ ID NO: 12333 - DNA, 118 bp, Simian immunodeficiency virus
ggatagcaacatttataggttctctctgaaagaggtttaaggatagtaaaaatatggatagtaatcttaagatagatattatcttaatatatagtctttaccctctctcatgctctct

SEQ ID NO: 12334 - DNA, 24 bp, Simian immunodeficiency virus
tattatcttaatatatagtcttta

SEQ ID NO: 12335 - DNA, 24 bp, Simian immunodeficiency virus
tctctgaaagaggtttaaggatag

SEQ ID NO: 12336 - DNA, 17 bp, Homo sapiens
tctgaagaggttcctgg

SEQ ID NO: 12337 - DNA, 18 bp, Homo sapiens
cctctgtcgtttgaggat

SEQ ID NO: 12338 - DNA, 18 bp, Homo sapiens
cctgaaagaggtatgtgg

SEQ ID NO: 12339 - DNA, 19 bp, Homo sapiens
tctgagagaggtctgatgg

SEQ ID NO: 12340 - DNA, 68 bp, Ectromelia virus
tgcgcatgaaaatatcattaaattgttttaaacattcttaaattcaatttaaaataatttttgtagca

SEQ ID NO: 12341 - DNA, 24 bp, Ectromelia virus
tgaaaatatcattaaattgtttta

SEQ ID NO: 12342 - DNA, 24 bp, Ectromelia virus
ttcaatttaaaataatttttgtag

SEQ ID NO: 12343 - DNA, 21 bp, Homo sapiens
tgagaatatcatttctgtttt

SEQ ID NO: 12344 - DNA, 23 bp, Homo sapiens
ttcatttaaaattacatttgtag

SEQ ID NO: 12345 - DNA, 95 bp, Ectromelia virus
tctcgttagcctgggtaggaaagacccaaccgcgatacccactgatctttaactttatgagaaaaacaggaattgcggtttcccccattagcaga

SEQ ID NO: 12346 - DNA, 24 bp, Ectromelia virus
aggaattgcggtttcccccattag

SEQ ID NO: 12347 - DNA, 24 bp, Ectromelia virus
gcctgggtaggaaagacccaaccg

SEQ ID NO: 12348 - DNA, 16 bp, Homo sapiens
gaattggctcccatta

SEQ ID NO: 12349 - DNA, 17 bp, Homo sapiens
ggaatacttcccccatt

SEQ ID NO: 12350 - DNA, 22 bp, Homo sapiens
aggagctggagatccccattag

SEQ ID NO: 12351 - DNA, 18 bp, Homo sapiens
gcctggggagactcccca

SEQ ID NO: 12352 - DNA, 17 bp, Homo sapiens
gcctgggcaggaaagcc

SEQ ID NO: 12353 - DNA, 19 bp, Homo sapiens
gcctaggtgggagggagcc

SEQ ID NO: 12354 - DNA, 17 bp, Homo sapiens
gcctgccagagacccaa

SEQ ID NO: 12355 - DNA, 18 bp, Homo sapiens
gcctgggttgggagagcc

SEQ ID NO: 12356 - DNA, 23 bp, Homo sapiens
gcccgggccgaggggcccgaccg

SEQ ID NO: 12357 - DNA, 16 bp, Homo sapiens
gccggcaaggcccaac

SEQ ID NO: 12358 - DNA, 16 bp, Homo sapiens
gccgaggggacccaac

SEQ ID NO: 12359 - DNA, 20 bp, Homo sapiens
gcctaggtagttttgcccaa

SEQ ID NO: 12360 - DNA, 18 bp, Homo sapiens
gcccgggtagggccggcc

SEQ ID NO: 12361 - DNA, 18 bp, Homo sapiens
gcctgggtgagggaggac

SEQ ID NO: 12362 - DNA, 19 bp, Homo sapiens
gcctgggcaggggagggcc

SEQ ID NO: 12363 - DNA, 19 bp, Homo sapiens
gcctggctggggaggccca

SEQ ID NO: 12364 - DNA, 64 bp, Variola virus
ggcggtatcggtacatatacgtaattcaccttcacaaaatacggagtcttcgataataatagcc

SEQ ID NO: 12365 - DNA, 24 bp, Variola virus
tatcggtacatatacgtaattcac

SEQ ID NO: 12366 - DNA, 22 bp, Variola virus
ggagtcttcgataataatagcc

SEQ ID NO: 12367 - DNA, 20 bp, Homo sapiens
gaagtcttcctacgggtagc

SEQ ID NO: 12368 - DNA, 22 bp, Homo sapiens
gcagttttcatctataatagcc

SEQ ID NO: 12369 - DNA, 17 bp, Homo sapiens
ggagccccggtagtagc

SEQ ID NO: 12370 - DNA, 19 bp, Homo sapiens
ggagccttcttctaatggc

SEQ ID NO: 12371 - DNA, 18 bp, Homo sapiens
ggactcttcgatagtaac

SEQ ID NO: 12372 - DNA, 19 bp, Homo sapiens
gggatcttcaaaagtagcc

SEQ ID NO: 12373 - DNA, 60 bp, Variola virus
gtcgctgaggaaatcacgaagaccattcagtcggtctacaatgatttcctgaagcttgac

SEQ ID NO: 12374 - DNA, 24 bp, Variola virus
tctacaatgatttcctgaagcttg

SEQ ID NO: 12375 - DNA, 24 bp, Variola virus
aggaaatcacgaagaccattcagt

SEQ ID NO: 12376 - DNA, 19 bp, Homo sapiens
tcaataatgatttcttgaa

SEQ ID NO: 12377 - DNA, 21 bp, Homo sapiens
tctcaaagcccctggagcttg

SEQ ID NO: 12378 - DNA, 19 bp, Homo sapiens
tctcaaagtcctgaagttt

SEQ ID NO: 12379 - DNA, 84 bp, Variola virus
gggtcgcggcccgaaggcggagatgccgagctcggccagttcgatgccctcggtacccatcccccttccacccgtcggcgaccc

SEQ ID NO: 12380 - DNA, 24 bp, Variola virus
tacccatcccccttccacccgtcg

SEQ ID NO: 12381 - DNA, 24 bp, Variola virus
aggcggagatgccgagctcggcca

SEQ ID NO: 12382 - DNA, 21 bp, Homo sapiens
aggcggagctgccaatggtcg

SEQ ID NO: 12383 - DNA, 19 bp, Homo sapiens
aggaggagatgctgattca

SEQ ID NO: 12384 - DNA, 18 bp, Homo sapiens
aggcggcgatgctgggcc

SEQ ID NO: 12385 - DNA, 22 bp, Homo sapiens
ggcgggggtggcggcgggagcc

SEQ ID NO: 12386 - DNA, 18 bp, Homo sapiens
ggcggggacgccgaggcc

SEQ ID NO: 12387 - DNA, 22 bp, Homo sapiens
aggggagatgttgcaagagcca

SEQ ID NO: 12388 - DNA, 21 bp, Homo sapiens
aggtggagatgcatgaggtca

SEQ ID NO: 12389 - DNA, 18 bp, Homo sapiens
agcggctcgggctcggcc

SEQ ID NO: 12390 - DNA, 21 bp, Homo sapiens
aggggaggtgcgtgatggtcg

SEQ ID NO: 12391 - DNA, 21 bp, Homo sapiens
aggtggagatgccacacgctc

SEQ ID NO: 12392 - DNA, 19 bp, Homo sapiens
aggcggaggctgcgcggcc

SEQ ID NO: 12393 - DNA, 21 bp, Homo sapiens
ggcgggcgggccagctcggcc

SEQ ID NO: 12394 - DNA, 18 bp, Homo sapiens
gggggcgcgggctcggcc

SEQ ID NO: 12395 - DNA, 20 bp, Homo sapiens
agccggccatgagcttggcc

SEQ ID NO: 12396 - DNA, 17 bp, Homo sapiens
ggcagaggtgccggggc

SEQ ID NO: 12397 - DNA, 16 bp, Homo sapiens
aggcggagggctggac

SEQ ID NO: 12398 - DNA, 17 bp, Homo sapiens
ggtggaatgctggctcg

SEQ ID NO: 12399 - DNA, 17 bp, Homo sapiens
ggtgtagatgccaggcc

SEQ ID NO: 12400 - DNA, 19 bp, Homo sapiens
aggcggaggtggcgccgcc

SEQ ID NO: 12401 - DNA, 77 bp, Variola virus
gttctcccgttgctattgcaacatccccggacacaagtgtcccttctgggatgtctcagcaagacgtgatgcagaac

SEQ ID NO: 12402 - DNA, 24 bp, Variola virus
tgggatgtctcagcaagacgtgat

SEQ ID NO: 12403 - DNA, 24 bp, Variola virus
tattgcaacatccccggacacaag

SEQ ID NO: 12404 - DNA, 22 bp, Homo sapiens
tggggggtctcagcactgtgat

SEQ ID NO: 12405 - DNA, 19 bp, Homo sapiens
tggggtgtcccagcacacg

SEQ ID NO: 12406 - DNA, 19 bp, Homo sapiens
tgggtgtttcagtagccgt

SEQ ID NO: 12407 - DNA, 20 bp, Homo sapiens
tggaatgttttagcagggac

SEQ ID NO: 12408 - DNA, 65 bp, Variola virus
gatcgatcgcaccgtgcaagcgtacagcaattgcaaaactaatgtaccacggtgcacacgagatc

SEQ ID NO: 12409 - DNA, 21 bp, Variola virus
taccacggtgcacacgagatc

SEQ ID NO: 12410 - DNA, 24 bp, Variola virus
tcgcaccgtgcaagcgtacagcaa

SEQ ID NO: 12411 - DNA, 17 bp, Homo sapiens
accacggcgtctgagat

SEQ ID NO: 12412 - DNA, 21 bp, Homo sapiens
taccacggttcctacagagat

SEQ ID NO: 12413 - DNA, 18 bp, Homo sapiens
cagtatagtcacgagatc

SEQ ID NO: 12414 - DNA, 18 bp, Homo sapiens
tactcggtacacgggatc

SEQ ID NO: 12415 - DNA, 61 bp, Variola virus
tcggattatccaccgaggaccaagtcgaaagttttatcaatgtcctcgcggataccgctgg

SEQ ID NO: 12416 - DNA, 24 bp, Variola virus
accgaggaccaagtcgaaagtttt

SEQ ID NO: 12417 - DNA, 23 bp, Variola virus
aatgtcctcgcggataccgctgg

SEQ ID NO: 12418 - DNA, 20 bp, Homo sapiens
gaggttatcatcaaagtttt

SEQ ID NO: 12419 - DNA, 62 bp, Variola virus
agcccggggtccaaaagagtgggtcgtacaacacgtcatctacgaactctaggatccgggtt

SEQ ID NO: 12420 - DNA, 24 bp, Variola virus
tccaaaagagtgggtcgtacaaca

SEQ ID NO: 12421 - DNA, 18 bp, Variola virus
aactctaggatccgggtt

SEQ ID NO: 12422 - DNA, 17 bp, Homo sapiens
tccgaaaagtgggagta

SEQ ID NO: 12423 - DNA, 17 bp, Homo sapiens
tccaagtggagtcatac

SEQ ID NO: 12424 - DNA, 20 bp, Homo sapiens
cctggaagagtgggccccca

SEQ ID NO: 12425 - DNA, 21 bp, Homo sapiens
caggaagagtggtcaaagcaa

SEQ ID NO: 12426 - DNA, 18 bp, Homo sapiens
gagattggttgtacaaca

SEQ ID NO: 12427 - DNA, 21 bp, Homo sapiens
tccaaaagggcgggaggagca

SEQ ID NO: 12428 - DNA, 19 bp, Homo sapiens
tccaaaaaggtgattggca

SEQ ID NO: 12429 - DNA, 19 bp, Homo sapiens
aaaagaatggagagcaaca

SEQ ID NO: 12430 - DNA, 17 bp, Homo sapiens
aagagtatgatacaaca

SEQ ID NO: 12431 - DNA, 18 bp, Homo sapiens
tccaaaagaggttccaca

SEQ ID NO: 12432 - DNA, 19 bp, Homo sapiens
tcctgagaggctgtacaac

SEQ ID NO: 12433 - DNA, 20 bp, Homo sapiens
tcacaggagagtgggtgtca

SEQ ID NO: 12434 - DNA, 68 bp, Variola virus
tgccctcgaagcgccagatacagatttgagcaagtataaagatctgggcttcaaagtcgaggttagca

SEQ ID NO: 12435 - DNA, 24 bp, Variola virus
tcgaagcgccagatacagatttga

SEQ ID NO: 12436 - DNA, 24 bp, Variola virus
taaagatctgggcttcaaagtcga

SEQ ID NO: 12437 - DNA, 20 bp, Homo sapiens
tcgaagtccaggtacagact

SEQ ID NO: 12438 - DNA, 63 bp, Variola virus
aagcgttatcacactgcgacgtgctgacaaaacccacgttggttttgccgtgtgcattcgctt

SEQ ID NO: 12439 - DNA, 24 bp, Variola virus
tatcacactgcgacgtgctgacaa

SEQ ID NO: 12440 - DNA, 20 bp, Variola virus
tttgccgtgtgcattcgctt

SEQ ID NO: 12441 - DNA, 23 bp, Homo sapiens
tatcctactgcatgaactgacaa

SEQ ID NO: 12442 - DNA, 24 bp, Homo sapiens
tatcacactctggggactgtggtg

SEQ ID NO: 12443 - DNA, 16 bp, Homo sapiens
tcacacagcactgaca

SEQ ID NO: 12444 - DNA, 16 bp, Homo sapiens
tatcacactacctgcc

SEQ ID NO: 12445 - DNA, 16 bp, Homo sapiens
cacacctgtgctgaca

SEQ ID NO: 12446 - DNA, 81 bp, Equine rhinitis B virus
gtggtagcgctgtgtgagttggcggtggatccccctcgtggtaacacgagcccccgtggccaaaagcccagtgtttacagc

SEQ ID NO: 12447 - DNA, 24 bp, Equine rhinitis B virus
ggtggatccccctcgtggtaacac

SEQ ID NO: 12448 - DNA, 99 bp, Equine rhinitis B virus
tagcgaccaaatgcaacataaacttagacaatctatttatctccatgactatcggaacagacaaaattgtaaccacttcgttttgctccttcatcgcta

SEQ ID NO: 12449 - DNA, 24 bp, Equine rhinitis B virus
agacaaaattgtaaccacttcgtt

SEQ ID NO: 12450 - DNA, 24 bp, Equine rhinitis B virus
agacaatctatttatctccatgac

SEQ ID NO: 12451 - DNA, 19 bp, Homo sapiens
agacaagattgtaacacct

SEQ ID NO: 12452 - DNA, 70 bp, Equine rhinitis B virus
ggcgacacatttctagacaggctgttgaaaatggactactgttttacatattacccttcttcaaatcgcc

SEQ ID NO: 12453 - DNA, 24 bp, Equine rhinitis B virus
tttacatattacccttcttcaaat

SEQ ID NO: 12454 - DNA, 24 bp, Equine rhinitis B virus
acacatttctagacaggctgttga

SEQ ID NO: 12455 - DNA, 21 bp, Homo sapiens
tttacatatttccccatttca

SEQ ID NO: 12456 - DNA, 94 bp, Meleagrid herpesvirus 1
ggtatatccctctaaatctgatgtttttgcatggacgaggtattgtgcccccgaccatgtaaaagttgtgattgtaggtcaggatccatatgcc

SEQ ID NO: 12457 - DNA, 24 bp, Meleagrid herpesvirus 1
tctaaatctgatgtttttgcatgg

SEQ ID NO: 12458 - DNA, 24 bp, Meleagrid herpesvirus 1
tgtaaaagttgtgattgtaggtca

SEQ ID NO: 12459 - DNA, 19 bp, Homo sapiens
tctagatctgatttttaca

SEQ ID NO: 12460 - DNA, 16 bp, Homo sapiens
tgtaaaagtttgaggt

SEQ ID NO: 12461 - DNA, 80 bp, Meleagrid herpesvirus 1
gtcgctgtccccggccgtgagcggagccgtgctctgggacggggaggcggcggccggggacgaagaagagaaggagcggc

SEQ ID NO: 12462 - DNA, 24 bp, Meleagrid herpesvirus 1
tccccggccgtgagcggagccgtg

SEQ ID NO: 12463 - DNA, 24 bp, Meleagrid herpesvirus 1
ggccggggacgaagaagagaagga

SEQ ID NO: 12464 - DNA, 19 bp, Homo sapiens
cctggccgtgacacccgtg

SEQ ID NO: 12465 - DNA, 20 bp, Homo sapiens
tccccggcctgggagccccg

SEQ ID NO: 12466 - DNA, 23 bp, Homo sapiens
gggcgtgagcaagctgagctgtg

SEQ ID NO: 12467 - DNA, 21 bp, Homo sapiens
gccctgagcagcggagccgtg

SEQ ID NO: 12468 - DNA, 19 bp, Homo sapiens
tcctcggctgtgacgccgc

SEQ ID NO: 12469 - DNA, 96 bp, Meleagrid herpesvirus 1
gcttcgccgcggcccgcgaccgcgcgctgcgcgcggtgccgtggcggccggcgatggtggacacggtggcgggcgcggtggcggacgcggtggagc

SEQ ID NO: 12470 - DNA, 24 bp, Meleagrid herpesvirus 1
gacacggtggcgggcgcggtggcg

SEQ ID NO: 12471 - DNA, 24 bp, Meleagrid herpesvirus 1
gcgcgctgcgcgcggtgccgtggc

SEQ ID NO: 12472 - DNA, 20 bp, Homo sapiens
gaccggtggcgggctcagcg

SEQ ID NO: 12473 - DNA, 18 bp, Homo sapiens
gcatggtggccacggtgg

SEQ ID NO: 12474 - DNA, 18 bp, Homo sapiens
ggcggcggtggcggtggc

SEQ ID NO: 12475 - DNA, 21 bp, Homo sapiens
ggagcggagggcgcggtggcg

SEQ ID NO: 12476 - DNA, 19 bp, Homo sapiens
cagaggcggcgcggtggcg

SEQ ID NO: 12477 - DNA, 18 bp, Homo sapiens
cacggtggggggagggtg

SEQ ID NO: 12478 - DNA, 19 bp, Homo sapiens
ggtggtggtggcggtggcg

SEQ ID NO: 12479 - DNA, 18 bp, Homo sapiens
ggtggcggtggcggtggc

SEQ ID NO: 12480 - DNA, 18 bp, Homo sapiens
cggtggcgggtctgggcg

SEQ ID NO: 12481 - DNA, 17 bp, Homo sapiens
ggtccgggtgcggtggc

SEQ ID NO: 12482 - DNA, 22 bp, Homo sapiens
gacacggtggtgggcacatcag

SEQ ID NO: 12483 - DNA, 22 bp, Homo sapiens
gaccgtggtggcagtggtggcg

SEQ ID NO: 12484 - DNA, 15 bp, Homo sapiens
cggtggcggcggtgg

SEQ ID NO: 12485 - DNA, 17 bp, Homo sapiens
gacaggtggcgggggcg

SEQ ID NO: 12486 - DNA, 16 bp, Homo sapiens
cacggtgcgaaggtgg

SEQ ID NO: 12487 - DNA, 20 bp, Homo sapiens
cggaacctggcgcggtggcg

SEQ ID NO: 12488 - DNA, 20 bp, Homo sapiens
cacagtggtggtcagggtgg

SEQ ID NO: 12489 - DNA, 17 bp, Homo sapiens
gacaggtggcgggcgcg

SEQ ID NO: 12490 - DNA, 18 bp, Homo sapiens
ggtgtggtggcggtggca

SEQ ID NO: 12491 - DNA, 22 bp, Homo sapiens
ggtggcggcggcggcggtggcg

SEQ ID NO: 12492 - DNA, 17 bp, Homo sapiens
gcacggtggggcggtgg

SEQ ID NO: 12493 - DNA, 18 bp, Homo sapiens
ggccgggggcgcggtggc

SEQ ID NO: 12494 - DNA, 19 bp, Homo sapiens
ggcggcggctgcgtggtgg

SEQ ID NO: 12495 - DNA, 24 bp, Homo sapiens
gacgcggcggtggcggcagtggcg

SEQ ID NO: 12496 - DNA, 126 bp, Meleagrid herpesvirus 1
ttcgtggcgggcggcctgatcctgctgggcgcgtgcgggctgacggtgtggctgtgccgccgcgcgcggcgggcgctcgacccgtcggcgctcgggcccggcgcggagaaggcggccctgctcgag

SEQ ID NO: 12497 - DNA, 24 bp, Meleagrid herpesvirus 1
tcgggcccggcgcggagaaggcgg

SEQ ID NO: 12498 - DNA, 24 bp, Meleagrid herpesvirus 1
atcctgctgggcgcgtgcgggctg

SEQ ID NO: 12499 - DNA, 19 bp, Homo sapiens
gggtccggcgcggccccgg

SEQ ID NO: 12500 - DNA, 21 bp, Homo sapiens
tcgagcccgcccagggggcgg

SEQ ID NO: 12501 - DNA, 20 bp, Homo sapiens
gggcccgggtatggaggcgg

SEQ ID NO: 12502 - DNA, 21 bp, Homo sapiens
cgggcccggcggtgagggcgg

SEQ ID NO: 12503 - DNA, 24 bp, Homo sapiens
tcgggtcgggggctcagaaggcgg

SEQ ID NO: 12504 - DNA, 22 bp, Homo sapiens
ggcccgacgcagggggaggtgg

SEQ ID NO: 12505 - DNA, 20 bp, Homo sapiens
cgggcgcacggaggaggcgg

SEQ ID NO: 12506 - DNA, 22 bp, Homo sapiens
tcaggcccggtgcggaccccgg

SEQ ID NO: 12507 - DNA, 19 bp, Homo sapiens
gcaaggcgcggagggggcg

SEQ ID NO: 12508 - DNA, 16 bp, Homo sapiens
tcgcgcccggcggggc

SEQ ID NO: 12509 - DNA, 17 bp, Homo sapiens
gggcccggcccagggcg

SEQ ID NO: 12510 - DNA, 18 bp, Homo sapiens
tcgggcccggccgctgcg

SEQ ID NO: 12511 - DNA, 24 bp, Homo sapiens
ggttcggcgaaggcgagagggcgg

SEQ ID NO: 12512 - DNA, 19 bp, Homo sapiens
gggcccagcggggaggtgg

SEQ ID NO: 12513 - DNA, 24 bp, Homo sapiens
cggagcgcggcgcggaggaggcgg

SEQ ID NO: 12514 - DNA, 18 bp, Homo sapiens
gggcccaaggggaggtgg

SEQ ID NO: 12515 - DNA, 21 bp, Homo sapiens
gcggggctgcggagaaggcgg

SEQ ID NO: 12516 - DNA, 19 bp, Homo sapiens
gggctgctaaagaaggtgg

SEQ ID NO: 12517 - DNA, 22 bp, Homo sapiens
ccgggcgcctcggggaaggcgg

SEQ ID NO: 12518 - DNA, 20 bp, Homo sapiens
tcgggtcaggacggaggtgg

SEQ ID NO: 12519 - DNA, 16 bp, Homo sapiens
gggccggcgcgttgcg

SEQ ID NO: 12520 - DNA, 22 bp, Homo sapiens
ggcggctgcgcggaggaggcgg

SEQ ID NO: 12521 - DNA, 16 bp, Homo sapiens
gggcctggagaaggcg

SEQ ID NO: 12522 - DNA, 131 bp, Monkeypox virus
acattatatacattatatacattatatacattatatacattatatacattatatacattatatacattatatacattatatacattatatacattatatacattatatacattatatacattatatacatt

SEQ ID NO: 12523 - DNA, 24 bp, Monkeypox virus
tacattatatacattatatacatt

SEQ ID NO: 12524 - DNA, 20 bp, Homo sapiens
tacatatatacatacatata

SEQ ID NO: 12525 - DNA, 18 bp, Homo sapiens
tatatatattatatacac

SEQ ID NO: 12526 - DNA, 22 bp, Homo sapiens
cattatatacaaacattacatt

SEQ ID NO: 12527 - DNA, 25 bp, Homo sapiens
tacaaaacattacattatatacatt

SEQ ID NO: 12528 - DNA, 20 bp, Homo sapiens
cattatatacataaaatata

SEQ ID NO: 12529 - DNA, 70 bp, Monkeypox virus
accccgctcctgggacaaatactccggaaacctccagggatcggaaatttatttagaaggggggtggggt

SEQ ID NO: 12530 - DNA, 17 bp, Monkeypox virus
tagaaggggggtggggt

SEQ ID NO: 12531 - DNA, 24 bp, Monkeypox virus
gctcctgggacaaatactccggaa

SEQ ID NO: 12532 - DNA, 18 bp, Homo sapiens
gaaggaaggcagtggggt

SEQ ID NO: 12533 - DNA, 19 bp, Homo sapiens
tagaagggactctaggggt

SEQ ID NO: 12534 - DNA, 18 bp, Homo sapiens
tagagaggatggaggggt

SEQ ID NO: 12535 - DNA, 18 bp, Homo sapiens
aagaggggtctgtagggt

SEQ ID NO: 12536 - DNA, 18 bp, Homo sapiens
gaagggagacaaaagggt

SEQ ID NO: 12537 - DNA, 18 bp, Homo sapiens
gaaggtgctgggtggggt

SEQ ID NO: 12538 - DNA, 18 bp, Homo sapiens
agaggggtggcctggggt

SEQ ID NO: 12539 - DNA, 18 bp, Homo sapiens
gacgggggaggctggggt

SEQ ID NO: 12540 - DNA, 18 bp, Homo sapiens
gaggggggctccgggggt

SEQ ID NO: 12541 - DNA, 19 bp, Homo sapiens
agaagggcagagttggggt

SEQ ID NO: 12542 - DNA, 18 bp, Homo sapiens
aaggggggtgcctggggt

SEQ ID NO: 12543 - DNA, 18 bp, Homo sapiens
taaaagagcctttggggt

SEQ ID NO: 12544 - DNA, 18 bp, Homo sapiens
tagatgggggatgtgggg

SEQ ID NO: 12545 - DNA, 15 bp, Homo sapiens
ggaggggtggggtac

SEQ ID NO: 12546 - DNA, 18 bp, Homo sapiens
caggcagggggtggggta

SEQ ID NO: 12547 - DNA, 18 bp, Homo sapiens
agaaggggcgctcggggt

SEQ ID NO: 12548 - DNA, 18 bp, Homo sapiens
taggtgggggaatgaggt

SEQ ID NO: 12549 - DNA, 18 bp, Homo sapiens
cagaggcagccttggggt

SEQ ID NO: 12550 - DNA, 19 bp, Homo sapiens
aagaggggctgagaggggt

SEQ ID NO: 12551 - DNA, 18 bp, Homo sapiens
tagaagggaggccttggt

SEQ ID NO: 12552 - DNA, 18 bp, Homo sapiens
cagagggggactgatggt

SEQ ID NO: 12553 - DNA, 19 bp, Homo sapiens
taggtgggagcgctggggt

SEQ ID NO: 12554 - DNA, 20 bp, Homo sapiens
agaaggggaagcagtggggt

SEQ ID NO: 12555 - DNA, 18 bp, Homo sapiens
gaaggggagggcaggggt

SEQ ID NO: 12556 - DNA, 18 bp, Homo sapiens
taaaagaagtggtggggt

SEQ ID NO: 12557 - DNA, 18 bp, Homo sapiens
cagaagggcatggagggt

SEQ ID NO: 12558 - DNA, 19 bp, Homo sapiens
agaaggaaaaaggtggggt

SEQ ID NO: 12559 - DNA, 15 bp, Homo sapiens
agggagggtggggta

SEQ ID NO: 12560 - DNA, 20 bp, Homo sapiens
cagaggggggcctcgggggt

SEQ ID NO: 12561 - DNA, 19 bp, Homo sapiens
taggcgggggcgcggcggt

SEQ ID NO: 12562 - DNA, 19 bp, Homo sapiens
cagaaatcgggggtggggt

SEQ ID NO: 12563 - DNA, 19 bp, Homo sapiens
cagaaacaagaggtggggt

SEQ ID NO: 12564 - DNA, 18 bp, Homo sapiens
aaggggagtccctggggt

SEQ ID NO: 12565 - DNA, 18 bp, Homo sapiens
aaggagttggagtggggt

SEQ ID NO: 12566 - DNA, 103 bp, Vaccinia virus
ctgtgaccaagatagagagctcctttggtgaatccatctctatgtttcagtttaaccaagaaacagtcagctggtctaaaatttccatctctatctaatacag

SEQ ID NO: 12567 - DNA, 24 bp, Vaccinia virus
accaagatagagagctcctttggt

SEQ ID NO: 12568 - DNA, 24 bp, Vaccinia virus
tctaaaatttccatctctatctaa

SEQ ID NO: 12569 - DNA, 18 bp, Homo sapiens
gatgcaaattcctttggt

SEQ ID NO: 12570 - DNA, 22 bp, Homo sapiens
accagggaggggttcctttggt

SEQ ID NO: 12571 - DNA, 21 bp, Homo sapiens
aatttccattccagaatatct

SEQ ID NO: 12572 - DNA, 23 bp, Homo sapiens
tctaaaatttttaatcccattct

SEQ ID NO: 12573 - DNA, 22 bp, Homo sapiens
tctatagcccttctctatctaa

SEQ ID NO: 12574 - DNA, 20 bp, Homo sapiens
aaatttcccatattatctaa

SEQ ID NO: 12575 - DNA, 21 bp, Homo sapiens
tctaaaattttcttttctcta

SEQ ID NO: 12576 - DNA, 22 bp, Homo sapiens
tcagaatttccatctttcttct

SEQ ID NO: 12577 - DNA, 63 bp, Vaccinia virus
agaaaaccaggcagcgtttgtaacgctttggtataccagcgatacacagcgtactgaatttct

SEQ ID NO: 12578 - DNA, 21 bp, Vaccinia virus
tacacagcgtactgaatttct

SEQ ID NO: 12579 - DNA, 24 bp, Vaccinia virus
cagcgtttgtaacgctttggtata

SEQ ID NO: 12580 - DNA, 22 bp, Homo sapiens
caggtttgtgactcccagtata

SEQ ID NO: 12581 - DNA, 77 bp, Ictalurid herpesvirus 1
tgtagtcctacaatcaagcgaggttgtagacgttacctacaatgaactacacctctaagcataacctgtcgggcaca

SEQ ID NO: 12582 - DNA, 24 bp, Ictalurid herpesvirus 1
cacctctaagcataacctgtcggg

SEQ ID NO: 12583 - DNA, 24 bp, Ictalurid herpesvirus 1
tcaagcgaggttgtagacgttacc

SEQ ID NO: 12584 - DNA, 19 bp, Homo sapiens
tcagggaggttgtggagtc

SEQ ID NO: 12585 - DNA, 19 bp, Homo sapiens
tcagtgaggttgcattgcc

SEQ ID NO: 12586 - DNA, 80 bp, Ictalurid herpesvirus 1
ttactattggactgtttatacttatcttcaaatgttcactcacagcagcgaaggggacactagaaaacactcccaagtag

SEQ ID NO: 12587 - DNA, 24 bp, Ictalurid herpesvirus 1
tggactgtttatacttatcttcaa

SEQ ID NO: 12588 - DNA, 24 bp, Ictalurid herpesvirus 1
agcgaaggggacactagaaaacac

SEQ ID NO: 12589 - DNA, 18 bp, Homo sapiens
agggaggggaagaaaaca

SEQ ID NO: 12590 - DNA, 19 bp, Homo sapiens
agcaggagggaggagacac

SEQ ID NO: 12591 - DNA, 17 bp, Homo sapiens
gagggggagaaaaacac

SEQ ID NO: 12592 - DNA, 21 bp, Homo sapiens
gaggacacagctagaaggcac

SEQ ID NO: 12593 - DNA, 21 bp, Homo sapiens
aggaagggggaatgaaaacac

SEQ ID NO: 12594 - DNA, 18 bp, Homo sapiens
agggaggggccgaaaaca

SEQ ID NO: 12595 - DNA, 15 bp, Homo sapiens
gcaagggaggaaaac

SEQ ID NO: 12596 - DNA, 15 bp, Homo sapiens
acggaggggaaaaac

SEQ ID NO: 12597 - DNA, 16 bp, Homo sapiens
agtgaaggagcagaga

SEQ ID NO: 12598 - DNA, 23 bp, Homo sapiens
agcgggggggaatgcgaggaaca

SEQ ID NO: 12599 - DNA, 17 bp, Homo sapiens
ggggaacgaaaaaacac

SEQ ID NO: 12600 - DNA, 19 bp, Homo sapiens
agtcaagggtaagaaaaca

SEQ ID NO: 12601 - DNA, 18 bp, Homo sapiens
agggaaggggactgctaa

SEQ ID NO: 12602 - DNA, 18 bp, Homo sapiens
agggagggaacagaggaa

SEQ ID NO: 12603 - DNA, 22 bp, Homo sapiens
agtgaaagggaaggtagaacac

SEQ ID NO: 12604 - DNA, 16 bp, Homo sapiens
aggaggggggaaaaac

SEQ ID NO: 12605 - DNA, 17 bp, Homo sapiens
agcgagtgggagcagaa

SEQ ID NO: 12606 - DNA, 21 bp, Homo sapiens
agggggcagtttggaaaacac

SEQ ID NO: 12607 - DNA, 23 bp, Homo sapiens
acggaggaagtgactagaaaaca

SEQ ID NO: 12608 - DNA, 16 bp, Homo sapiens
agggaaggggaagaaa

SEQ ID NO: 12609 - DNA, 16 bp, Homo sapiens
agtgaaggggcacaac

SEQ ID NO: 12610 - DNA, 22 bp, Homo sapiens
gagggggacatggaaaaaacac

SEQ ID NO: 12611 - DNA, 16 bp, Homo sapiens
aggagggggggaaaac

SEQ ID NO: 12612 - DNA, 20 bp, Homo sapiens
agtgaggggagcttgaccag

SEQ ID NO: 12613 - DNA, 17 bp, Homo sapiens
agtgaaagggaaacaga

SEQ ID NO: 12614 - DNA, 24 bp, Homo sapiens
agttaaggggacatttcaactaaa

SEQ ID NO: 12615 - DNA, 20 bp, Homo sapiens
gaaggggatactgctaaaca

SEQ ID NO: 12616 - DNA, 68 bp, Ictalurid herpesvirus 1
taaccttagctctaactctgaccctaggcctaaccctaagcctaaccctaaccgtagctctaagttta

SEQ ID NO: 12617 - DNA, 24 bp, Ictalurid herpesvirus 1
tctaactctgaccctaggcctaac

SEQ ID NO: 12618 - DNA, 24 bp, Ictalurid herpesvirus 1
taaccctaaccgtagctctaagtt

SEQ ID NO: 12619 - DNA, 18 bp, Homo sapiens
taaccttagtttccaagt

SEQ ID NO: 12620 - DNA, 19 bp, Homo sapiens
actctaaagtctctaagtt

SEQ ID NO: 12621 - DNA, 17 bp, Homo sapiens
cctcgttcctctaagtt

SEQ ID NO: 12622 - DNA, 20 bp, Homo sapiens
caaccctaactgtagaaaag

SEQ ID NO: 12623 - DNA, 20 bp, Homo sapiens
ctaaccatcatttctaggtt

SEQ ID NO: 12624 - DNA, 60 bp, Ictalurid herpesvirus 1
gcagcgcggcgcacagagcgaaggcagcggctttcagactgtttgccaagcgcagtctgc

SEQ ID NO: 12625 - DNA, 24 bp, Ictalurid herpesvirus 1
agactgtttgccaagcgcagtctg

SEQ ID NO: 12626 - DNA, 24 bp, Ictalurid herpesvirus 1
gcgcacagagcgaaggcagcggct

SEQ ID NO: 12627 - DNA, 16 bp, Homo sapiens
acgcagcggcagtggc

SEQ ID NO: 12628 - DNA, 21 bp, Homo sapiens
gcgcggcgcggcccagcggct

SEQ ID NO: 12629 - DNA, 16 bp, Homo sapiens
gcggcggcggcagcgg

SEQ ID NO: 12630 - DNA, 19 bp, Homo sapiens
gctgcagagcgagggccgg

SEQ ID NO: 12631 - DNA, 20 bp, Homo sapiens
gcagagagcgaacttgggct

SEQ ID NO: 12632 - DNA, 20 bp, Homo sapiens
gcaggcagcgggcggcggct

SEQ ID NO: 12633 - DNA, 19 bp, Homo sapiens
gcgcagcggggacagcggc

SEQ ID NO: 12634 - DNA, 16 bp, Homo sapiens
gcgggagcgaaggcag

SEQ ID NO: 12635 - DNA, 21 bp, Homo sapiens
cagggagcgggggcagcggct

SEQ ID NO: 12636 - DNA, 18 bp, Homo sapiens
gcgcacagaggcggaggc

SEQ ID NO: 12637 - DNA, 22 bp, Homo sapiens
gctgcagggcgaaggggccgct

SEQ ID NO: 12638 - DNA, 19 bp, Homo sapiens
gcacagagttaagagggct

SEQ ID NO: 12639 - DNA, 22 bp, Homo sapiens
gcctgtagcaggggcagcggct

SEQ ID NO: 12640 - DNA, 21 bp, Homo sapiens
gcaagggcgagggcggcggct

SEQ ID NO: 12641 - DNA, 23 bp, Homo sapiens
gcgcccggcccggggcagcggct

SEQ ID NO: 12642 - DNA, 22 bp, Homo sapiens
gcgagcagctgaggcggcggct

SEQ ID NO: 12643 - DNA, 60 bp, Rat cytomegalovirus
gcgcgcctcgtcgaccgggcgaccggaccccgcgggcccgggtctcggtcgttcacgcgc

SEQ ID NO: 12644 - DNA, 24 bp, Rat cytomegalovirus
gcccgggtctcggtcgttcacgcg

SEQ ID NO: 12645 - DNA, 24 bp, Rat cytomegalovirus
gaccgggcgaccggaccccgcggg

SEQ ID NO: 12646 - DNA, 18 bp, Homo sapiens
gcccggggttcggagcgc

SEQ ID NO: 12647 - DNA, 24 bp, Homo sapiens
gcccgggcttgggtgtgcgcgtga

SEQ ID NO: 12648 - DNA, 18 bp, Homo sapiens
gcctggtctcggcggcgc

SEQ ID NO: 12649 - DNA, 85 bp, Rat cytomegalovirus
gtccgaggtcctggtcgcattatcgtgggtgtgttcttcgtccagcatccaggccgctcgagacccgctggcgagggcctcggat

SEQ ID NO: 12650 - DNA, 24 bp, Rat cytomegalovirus
tcgtgggtgtgttcttcgtccagc

SEQ ID NO: 12651 - DNA, 17 bp, Rat cytomegalovirus
tggcgagggcctcggat

SEQ ID NO: 12652 - DNA, 18 bp, Homo sapiens
tggcaagatacgctggat

SEQ ID NO: 12653 - DNA, 20 bp, Homo sapiens
tagcaaaatgggctttggat

SEQ ID NO: 12654 - DNA, 19 bp, Homo sapiens
tggcaaggatttcttggat

SEQ ID NO: 12655 - DNA, 80 bp, Rat cytomegalovirus
ttcagtacgtagtagcttctcgaacagattcgttcgtttacaatgagccagttttttcagatggattttactgtggtgaa

SEQ ID NO: 12656 - DNA, 24 bp, Rat cytomegalovirus
tgagccagttttttcagatggatt

SEQ ID NO: 12657 - DNA, 24 bp, Rat cytomegalovirus
agcttctcgaacagattcgttcgt

SEQ ID NO: 12658 - DNA, 19 bp, Homo sapiens
gagctggtttttcctttgg

SEQ ID NO: 12659 - DNA, 24 bp, Homo sapiens
tggctagtttggcactgatggatt

SEQ ID NO: 12660 - DNA, 60 bp, Rat cytomegalovirus
gtccttctctgcttcttttctgtgttctcttgccttttttcacgggggctgaagaaggac

SEQ ID NO: 12661 - DNA, 24 bp, Rat cytomegalovirus
tctctgcttcttttctgtgttctc

SEQ ID NO: 12662 - DNA, 17 bp, Rat cytomegalovirus
gggggctgaagaaggac

SEQ ID NO: 12663 - DNA, 19 bp, Homo sapiens
tctcttccactgttgtgtt

SEQ ID NO: 12664 - DNA, 18 bp, Homo sapiens
tctccttctttttgctct

SEQ ID NO: 12665 - DNA, 21 bp, Homo sapiens
tctctccttttttttaatatt

SEQ ID NO: 12666 - DNA, 18 bp, Homo sapiens
tctgcttcttttataatc

SEQ ID NO: 12667 - DNA, 16 bp, Homo sapiens
tctgtgcttcgtgttc

SEQ ID NO: 12668 - DNA, 22 bp, Homo sapiens
tctctgcttttcttgctgtctc

SEQ ID NO: 12669 - DNA, 23 bp, Homo sapiens
tctctcttcttttcaatactttc

SEQ ID NO: 12670 - DNA, 23 bp, Homo sapiens
tctctgctctcttttcagttctc

SEQ ID NO: 12671 - DNA, 19 bp, Homo sapiens
tcagcttctttcccttttc

SEQ ID NO: 12672 - DNA, 25 bp, Homo sapiens
tctctcttcttaatgcagtgttctc

SEQ ID NO: 12673 - DNA, 16 bp, Homo sapiens
tctctactcctgtgtt

SEQ ID NO: 12674 - DNA, 21 bp, Homo sapiens
tctttccttcttttcagtgtt

SEQ ID NO: 12675 - DNA, 17 bp, Homo sapiens
tcttttcttttctttct

SEQ ID NO: 12676 - DNA, 21 bp, Homo sapiens
tctctgttcttttcctttctc

SEQ ID NO: 12677 - DNA, 21 bp, Homo sapiens
ctgcttcttttctaggcttct

SEQ ID NO: 12678 - DNA, 23 bp, Homo sapiens
tctgtgcttttttttctattttc

SEQ ID NO: 12679 - DNA, 20 bp, Homo sapiens
tctcttcttcttttccttct

SEQ ID NO: 12680 - DNA, 19 bp, Homo sapiens
tctctgtttgcttttttgt

SEQ ID NO: 12681 - DNA, 21 bp, Homo sapiens
tctctgatttctctgtgttct

SEQ ID NO: 12682 - DNA, 16 bp, Homo sapiens
tctgttttcatgttct

SEQ ID NO: 12683 - DNA, 18 bp, Homo sapiens
tctcttttttcctcttct

SEQ ID NO: 12684 - DNA, 19 bp, Homo sapiens
tctctgtattctttcttct

SEQ ID NO: 12685 - DNA, 20 bp, Homo sapiens
tctctttttttttctatatt

SEQ ID NO: 12686 - DNA, 22 bp, Homo sapiens
tctctgctgcttgtgtgttctc

SEQ ID NO: 12687 - DNA, 22 bp, Homo sapiens
tctctgctgcctgtgtgttctc

SEQ ID NO: 12688 - DNA, 22 bp, Homo sapiens
tctctgctgtctgtgtgttctc

SEQ ID NO: 12689 - DNA, 19 bp, Homo sapiens
ttcttttctttttatcccc

SEQ ID NO: 12690 - DNA, 18 bp, Homo sapiens
tctctgattctctgttct

SEQ ID NO: 12691 - DNA, 14 bp, Homo sapiens
tgctccttggttct

SEQ ID NO: 12692 - DNA, 23 bp, Homo sapiens
tcttctgctttgttgtttgtgtt

SEQ ID NO: 12693 - DNA, 16 bp, Homo sapiens
ctgcttcttttgttct

SEQ ID NO: 12694 - DNA, 65 bp, Rat cytomegalovirus
gggaggttcttatattccagggctctgacaggtatctcactgttatctcccctgggttttctcct

SEQ ID NO: 12695 - DNA, 18 bp, Rat cytomegalovirus
tcccctgggttttctcct

SEQ ID NO: 12696 - DNA, 24 bp, Rat cytomegalovirus
tattccagggctctgacaggtatc

SEQ ID NO: 12697 - DNA, 23 bp, Homo sapiens
tccagggctgagtcacgggtatc

SEQ ID NO: 12698 - DNA, 21 bp, Homo sapiens
ttccgggcttccccaggtatc

SEQ ID NO: 12699 - DNA, 18 bp, Homo sapiens
ctccaactcctgatgggt

SEQ ID NO: 12700 - DNA, 131 bp, Melanoplus sanguinipes entomopoxvirus
atatacccccaattagcccccaattggcacatggtaatataccgccatggcgccgtgcttggtattggtggtgatgttcacataaacagccagctgggggtgttttgtttaggtgggcttttgtggtatat

SEQ ID NO: 12701 - DNA, 24 bp, Melanoplus sanguinipes entomopoxvirus
ttcacataaacagccagctggggg

SEQ ID NO: 12702 - DNA, 24 bp, Melanoplus sanguinipes entomopoxvirus
taatataccgccatggcgccgtgc

SEQ ID NO: 12703 - DNA, 22 bp, Homo sapiens
taatatacattctggtgctgtg

SEQ ID NO: 12704 - DNA, 68 bp, Melanoplus sanguinipes entomopoxvirus
agatctcccccatgcaaatgttttagggtaggctgtacatggaataggtaaacgcttgggggtcttct

SEQ ID NO: 12705 - DNA, 24 bp, Melanoplus sanguinipes entomopoxvirus
tggaataggtaaacgcttgggggt

SEQ ID NO: 12706 - DNA, 24 bp, Melanoplus sanguinipes entomopoxvirus
cccccatgcaaatgttttagggta

SEQ ID NO: 12707 - DNA, 17 bp, Homo sapiens
ccccagcaaatgtttta

SEQ ID NO: 12708 - DNA, 17 bp, Homo sapiens
ccccgtggggccagggt

SEQ ID NO: 12709 - DNA, 20 bp, Homo sapiens
cccatgcagctggaatggta

SEQ ID NO: 12710 - DNA, 19 bp, Homo sapiens
cccctgtgcatatgttcca

SEQ ID NO: 12711 - DNA, 21 bp, Homo sapiens
cccgtgcgccctctttagggt

SEQ ID NO: 12712 - DNA, 21 bp, Homo sapiens
ccgcatgcagcctcctagggt

SEQ ID NO: 12713 - DNA, 17 bp, Homo sapiens
cccatgcagtctggggt

SEQ ID NO: 12714 - DNA, 20 bp, Homo sapiens
ccctgcaggctgcctagggt

SEQ ID NO: 12715 - DNA, 18 bp, Homo sapiens
cccatacaaactgagggt

SEQ ID NO: 12716 - DNA, 83 bp, Melanoplus sanguinipes entomopoxvirus
gtttgggaaaaggagatttctgcaggtgcagtggttcccccgggccttatatcttgcagctttagaaatctgctttctcaaac

SEQ ID NO: 12717 - DNA, 24 bp, Melanoplus sanguinipes entomopoxvirus
tatcttgcagctttagaaatctgc

SEQ ID NO: 12718 - DNA, 24 bp, Melanoplus sanguinipes entomopoxvirus
aggagatttctgcaggtgcagtgg

SEQ ID NO: 12719 - DNA, 20 bp, Homo sapiens
ggagatttttggagatgtgg

SEQ ID NO: 12720 - DNA, 21 bp, Homo sapiens
ggagctgggcaggtgcagtgg

SEQ ID NO: 12721 - DNA, 19 bp, Homo sapiens
aggagatttctcagcagtg

SEQ ID NO: 12722 - DNA, 18 bp, Homo sapiens
agagatttctggctggtg

SEQ ID NO: 12723 - DNA, 17 bp, Homo sapiens
ggagattcagtgtggtg

SEQ ID NO: 12724 - DNA, 17 bp, Homo sapiens
gagacggggtgcagtgg

SEQ ID NO: 12725 - DNA, 22 bp, Homo sapiens
gagcgctctgcaggtgtggtgg

SEQ ID NO: 12726 - DNA, 23 bp, Homo sapiens
aagaggctcggcaggtgcggtgg

SEQ ID NO: 12727 - DNA, 21 bp, Homo sapiens
aggtggtttctgttgcactgg

SEQ ID NO: 12728 - DNA, 63 bp, Rat cytomegalovirus
gtccaacaacatatactcatagagcttatcaaacatcccctgtgcccatctaggttgccagac

SEQ ID NO: 12729 - DNA, 24 bp, Rat cytomegalovirus
aacaacatatactcatagagctta

SEQ ID NO: 12730 - DNA, 22 bp, Rat cytomegalovirus
gtgcccatctaggttgccagac

SEQ ID NO: 12731 - DNA, 15 bp, Homo sapiens
aacataatagagctt

SEQ ID NO: 12732 - DNA, 20 bp, Homo sapiens
aacaacacacactggggctt

SEQ ID NO: 12733 - DNA, 20 bp, Homo sapiens
aacaacatatgctgctgctc

SEQ ID NO: 12734 - DNA, 21 bp, Homo sapiens
aacatgtactacaaaagctta

SEQ ID NO: 12735 - DNA, 17 bp, Homo sapiens
atatatcataaagctta

SEQ ID NO: 12736 - DNA, 15 bp, Homo sapiens
aacatacacaggctt

SEQ ID NO: 12737 - DNA, 19 bp, Homo sapiens
gtgcctgaatggttgccag

SEQ ID NO: 12738 - DNA, 16 bp, Homo sapiens
gtgccttctaagccag

SEQ ID NO: 12739 - DNA, 16 bp, Homo sapiens
gtgcccatctcaacca

SEQ ID NO: 12740 - DNA, 15 bp, Homo sapiens
gcctccggttgccag

SEQ ID NO: 12741 - DNA, 16 bp, Homo sapiens
tgctctgttgccagac

SEQ ID NO: 12742 - DNA, 22 bp, Homo sapiens
atgttcatcttacgtgccagac

SEQ ID NO: 12743 - DNA, 18 bp, Homo sapiens
ccctgttccccgccagac

SEQ ID NO: 12744 - DNA, 16 bp, Homo sapiens
gtgcccactggaacag

SEQ ID NO: 12745 - DNA, 17 bp, Homo sapiens
tgctcagtcattgccag

SEQ ID NO: 12746 - DNA, 14 bp, Homo sapiens
gcccatcccgccag

SEQ ID NO: 12747 - DNA, 20 bp, Homo sapiens
gtgccccggccttgccagac

SEQ ID NO: 12748 - DNA, 19 bp, Homo sapiens
tgcgtccaggttgctggac

SEQ ID NO: 12749 - DNA, 22 bp, Homo sapiens
gtgcccatttagtttgtctgga

SEQ ID NO: 12750 - DNA, 17 bp, Homo sapiens
gcctgactttgccagac

SEQ ID NO: 12751 - DNA, 17 bp, Homo sapiens
gtgcccactaagtcaga

SEQ ID NO: 12752 - DNA, 14 bp, Homo sapiens
tgctctgttgccag

SEQ ID NO: 12753 - DNA, 19 bp, Homo sapiens
gtgcctgtccagagccaga

SEQ ID NO: 12754 - DNA, 16 bp, Homo sapiens
gtgcccatgttccaga

SEQ ID NO: 12755 - DNA, 16 bp, Homo sapiens
gtgcccacctggggcc

SEQ ID NO: 12756 - DNA, 16 bp, Homo sapiens
gctcatctagggcaag

SEQ ID NO: 12757 - DNA, 17 bp, Homo sapiens
gtgtcctcactgccaga

SEQ ID NO: 12758 - DNA, 17 bp, Homo sapiens
gtgttgtccaggctaga

SEQ ID NO: 12759 - DNA, 17 bp, Homo sapiens
gtgccatctaaggccag

SEQ ID NO: 12760 - DNA, 17 bp, Homo sapiens
gtgcccatcagtgccaa

SEQ ID NO: 12761 - DNA, 25 bp, Homo sapiens
gtgcccatccaggagcaagtcagac

SEQ ID NO: 12762 - DNA, 14 bp, Homo sapiens
gcccatctgcccag

SEQ ID NO: 12763 - DNA, 19 bp, Homo sapiens
gtgcccatcgagttgggac

SEQ ID NO: 12764 - DNA, 18 bp, Homo sapiens
gtacccatctacacgggt

SEQ ID NO: 12765 - DNA, 112 bp, Melanoplus sanguinipes entomopoxvirus
ggtttaatattttcttagtacaaaagtcaatgttttaaaatatatggatgagagaatatttgtctgtataaaaactgtgtgaaattttgtaccaaagaaaaaaacgtgagcc

SEQ ID NO: 12766 - DNA, 24 bp, Melanoplus sanguinipes entomopoxvirus
tattttcttagtacaaaagtcaat

SEQ ID NO: 12767 - DNA, 24 bp, Melanoplus sanguinipes entomopoxvirus
tgtgaaattttgtaccaaagaaaa

SEQ ID NO: 12768 - DNA, 24 bp, Homo sapiens
tgtgaaattttagataacagaaaa

SEQ ID NO: 12769 - DNA, 22 bp, Homo sapiens
tgtggagttctgtaccttaaga

SEQ ID NO: 12770 - DNA, 16 bp, Homo sapiens
tgtgtaacaccaaaga

SEQ ID NO: 12771 - DNA, 25 bp, Homo sapiens
tgtgaaatatttgtattgcactgaa

SEQ ID NO: 12772 - DNA, 20 bp, Homo sapiens
tggaaattttgtgctcaaag

SEQ ID NO: 12773 - DNA, 21 bp, Homo sapiens
tggaaatggaagcccaaagaa

SEQ ID NO: 12774 - DNA, 21 bp, Homo sapiens
tgtgaaattttgtttaaaaaa

SEQ ID NO: 12775 - DNA, 21 bp, Homo sapiens
gtgaaattttgtaggtgaaaa

SEQ ID NO: 12776 - DNA, 20 bp, Homo sapiens
tgtgagattttataacaaaa

SEQ ID NO: 12777 - DNA, 21 bp, Homo sapiens
gtggatggaataccaaagaaa

SEQ ID NO: 12778 - DNA, 20 bp, Homo sapiens
tgtgaaattttggccccaaa

SEQ ID NO: 12779 - DNA, 19 bp, Homo sapiens
tgtgaaatttttgccaaaa

SEQ ID NO: 12780 - DNA, 17 bp, Homo sapiens
tgtaaaattttgaaaga

SEQ ID NO: 12781 - DNA, 24 bp, Homo sapiens
tgagaagtgccaccccaaagaaaa

SEQ ID NO: 12782 - DNA, 131 bp, Melanoplus sanguinipes entomopoxvirus
ccatcagaaagagaataaaaatatttttgtaaaacttttttatgagaccatcgaagagagaaagagataaaacttttttacgactccatcagaaagagaataaaaatatttttgtaaaacttttttatgag

SEQ ID NO: 12783 - DNA, 24 bp, Melanoplus sanguinipes entomopoxvirus
tcagaaagagaataaaaatatttt

SEQ ID NO: 12784 - DNA, 23 bp, Homo sapiens
agaaaaggtaataaaaatatttt

SEQ ID NO: 12785 - DNA, 18 bp, Homo sapiens
agaaaataaaaatatttt

SEQ ID NO: 12786 - DNA, 21 bp, Homo sapiens
agaaaaagagtaaaacacttt

SEQ ID NO: 12787 - DNA, 68 bp, Melanoplus sanguinipes entomopoxvirus
tattaaatgttgtatttttactaggttcaggtatattctcaaacccataaaaatttttaatttcaata

SEQ ID NO: 12788 - DNA, 24 bp, Melanoplus sanguinipes entomopoxvirus
ttaaatgttgtatttttactaggt

SEQ ID NO: 12789 - DNA, 24 bp, Melanoplus sanguinipes entomopoxvirus
aacccataaaaatttttaatttca

SEQ ID NO: 12790 - DNA, 20 bp, Homo sapiens
cataaaaattttacatttca

SEQ ID NO: 12791 - DNA, 129 bp, Bovine syncytial virus
catcgttaaaatttttagcatatccatcattttttaaattttcaaatgattctctagatttccataaatatcctggatctaaattagaatcagaaactttaaatttatattctatagtttttaatgatg

SEQ ID NO: 12792 - DNA, 24 bp, Bovine syncytial virus
tagcatatccatcattttttaaat

SEQ ID NO: 12793 - DNA, 24 bp, Bovine syncytial virus
ttagaatcagaaactttaaattta

SEQ ID NO: 12794 - DNA, 22 bp, Homo sapiens
agcatatctatcaaatctaaat

SEQ ID NO: 12795 - DNA, 19 bp, Homo sapiens
catcatcatcattttttaa

SEQ ID NO: 12796 - DNA, 21 bp, Homo sapiens
tagcaatgtccactcctttaa

SEQ ID NO: 12797 - DNA, 19 bp, Homo sapiens
tagcatatctacacaatct

SEQ ID NO: 12798 - DNA, 19 bp, Homo sapiens
tagcatatcaatctttaaa

SEQ ID NO: 12799 - DNA, 19 bp, Homo sapiens
catccatcattttttaaat

SEQ ID NO: 12800 - DNA, 22 bp, Homo sapiens
tagcatatcatatctcctaaat

SEQ ID NO: 12801 - DNA, 18 bp, Homo sapiens
ttaaagtcagaaacttta

SEQ ID NO: 12802 - DNA, 20 bp, Homo sapiens
tagaatcagggattacttta

SEQ ID NO: 12803 - DNA, 61 bp, Rat cytomegalovirus
gacggtggaggggcgggcgccacgggctcgggggaggatggcgcttggcctgcagaccgtc

SEQ ID NO: 12804 - DNA, 21 bp, Rat cytomegalovirus
gcgcttggcctgcagaccgtc

SEQ ID NO: 12805 - DNA, 24 bp, Rat cytomegalovirus
gaggggcgggcgccacgggctcgg

SEQ ID NO: 12806 - DNA, 18 bp, Homo sapiens
gcggggctgcaggttgtc

SEQ ID NO: 12807 - DNA, 17 bp, Homo sapiens
gctttgcaaaaaccgtc

SEQ ID NO: 12808 - DNA, 21 bp, Homo sapiens
gcgctcggcccggcagccgtc

SEQ ID NO: 12809 - DNA, 17 bp, Homo sapiens
gtgctgagtagaccgtc

SEQ ID NO: 12810 - DNA, 20 bp, Homo sapiens
gctggcctgtagattgagtc

SEQ ID NO: 12811 - DNA, 19 bp, Homo sapiens
ggcaagacctgcagatcgt

SEQ ID NO: 12812 - DNA, 18 bp, Homo sapiens
gcttggcccagcctcgtc

SEQ ID NO: 12813 - DNA, 21 bp, Homo sapiens
gcgcctggcccgagagttgtc

SEQ ID NO: 12814 - DNA, 23 bp, Homo sapiens
gccttggcctgccccagcctgtc

SEQ ID NO: 12815 - DNA, 18 bp, Homo sapiens
gcgtctggcctggatcgc

SEQ ID NO: 12816 - DNA, 18 bp, Homo sapiens
cgcagcggtgcagaccgt

SEQ ID NO: 12817 - DNA, 21 bp, Homo sapiens
gcacttggcttgcccaaagtc

SEQ ID NO: 12818 - DNA, 19 bp, Homo sapiens
gccttggcctgtcacggtc

SEQ ID NO: 12819 - DNA, 17 bp, Homo sapiens
gcacttggcctccccgt

SEQ ID NO: 12820 - DNA, 21 bp, Homo sapiens
gcttggccaggtcaggactgt

SEQ ID NO: 12821 - DNA, 18 bp, Homo sapiens
gcctggcccccaaattgt

SEQ ID NO: 12822 - DNA, 92 bp, Rat cytomegalovirus
gttgccggcgcgggcccagacgctcggggcgaagctctggaggtccagcgggccgtagagcgtctcgacggaggtgggtcccggcgggtaat

SEQ ID NO: 12823 - DNA, 24 bp, Rat cytomegalovirus
gtagagcgtctcgacggaggtggg

SEQ ID NO: 12824 - DNA, 24 bp, Rat cytomegalovirus
tgccggcgcgggcccagacgctcg

SEQ ID NO: 12825 - DNA, 20 bp, Homo sapiens
gaggtgggagtggaggtggg

SEQ ID NO: 12826 - DNA, 17 bp, Homo sapiens
agggcgtggggaggtgg

SEQ ID NO: 12827 - DNA, 18 bp, Homo sapiens
aagggtgtcaggaggtgg

SEQ ID NO: 12828 - DNA, 23 bp, Homo sapiens
gtggagatggcgttgggggtggg

SEQ ID NO: 12829 - DNA, 18 bp, Homo sapiens
gagagcccgtggaggtgg

SEQ ID NO: 12830 - DNA, 21 bp, Homo sapiens
atagaggtgggtgggggtggg

SEQ ID NO: 12831 - DNA, 19 bp, Homo sapiens
gctgatgactggaggtggg

SEQ ID NO: 12832 - DNA, 22 bp, Homo sapiens
gtctgcgtttgatggaggtggg

SEQ ID NO: 12833 - DNA, 19 bp, Homo sapiens
gtggaatgtcttgagatgg

SEQ ID NO: 12834 - DNA, 63 bp, Fowlpox virus
gtatgggaaaacaaataggtggactgttattgtgggttcacacgttatatgttctcctagtac

SEQ ID NO: 12835 - DNA, 24 bp, Fowlpox virus
ttcacacgttatatgttctcctag

SEQ ID NO: 12836 - DNA, 24 bp, Fowlpox virus
tgggaaaacaaataggtggactgt

SEQ ID NO: 12837 - DNA, 18 bp, Homo sapiens
acacaaatgttctcctag

SEQ ID NO: 12838 - DNA, 18 bp, Homo sapiens
ttcgcatttatatgttct

SEQ ID NO: 12839 - DNA, 18 bp, Homo sapiens
tccacactttgttctcct

SEQ ID NO: 12840 - DNA, 83 bp, Paramecium bursaria Chlorella virus 1
ccatgatgaaggtcctcaatgccatcaaggagtctggtaaggactacttcatccagctcgatgaggcagactctgtcatcagg

SEQ ID NO: 12841 - DNA, 24 bp, Paramecium bursaria Chlorella virus 1
atgaaggtcctcaatgccatcaag

SEQ ID NO: 12842 - DNA, 24 bp, Paramecium bursaria Chlorella virus 1
atccagctcgatgaggcagactct

SEQ ID NO: 12843 - DNA, 15 bp, Homo sapiens
tgaagtcctcaatca

SEQ ID NO: 12844 - DNA, 21 bp, Homo sapiens
tgaaagtccttgataatcaaa

SEQ ID NO: 12845 - DNA, 19 bp, Homo sapiens
atgaaggtttttgatgcca

SEQ ID NO: 12846 - DNA, 17 bp, Homo sapiens
atgaaggtccttggcca

SEQ ID NO: 12847 - DNA, 20 bp, Homo sapiens
atgaaggtcctcagcggcac

SEQ ID NO: 12848 - DNA, 21 bp, Homo sapiens
acgaaggtccctttcatcaag

SEQ ID NO: 12849 - DNA, 65 bp, Paramecium bursaria Chlorella virus 1
gtagacgtaatcgacttagaagcggattataaaaccgtatttgacgtgatttattacatgtatac

SEQ ID NO: 12850 - DNA, 24 bp, Paramecium bursaria Chlorella virus 1
tgacgtgatttattacatgtatac

SEQ ID NO: 12851 - DNA, 24 bp, Paramecium bursaria Chlorella virus 1
gacgtaatcgacttagaagcggat

SEQ ID NO: 12852 - DNA, 18 bp, Homo sapiens
taatgaagttacatgtat

SEQ ID NO: 12853 - DNA, 113 bp, Marburg virus
aactacctcttaagcttttgtggatggtttcaatatgtgcgtagaggttaatttaaagagatttcttgttgcacagttttttgtattacttacttgggcttgaagacatagtt

SEQ ID NO: 12854 - DNA, 24 bp, Marburg virus
ttgcacagttttttgtattactta

SEQ ID NO: 12855 - DNA, 24 bp, Marburg virus
cctcttaagcttttgtggatggtt

SEQ ID NO: 12856 - DNA, 19 bp, Homo sapiens
ttgcacagttttcaaaatt

SEQ ID NO: 12857 - DNA, 18 bp, Homo sapiens
ttgcaagttttttgactt

SEQ ID NO: 12858 - DNA, 19 bp, Homo sapiens
gcacagtttttaatgcatt

SEQ ID NO: 12859 - DNA, 18 bp, Homo sapiens
gcacaggctgtattactt

SEQ ID NO: 12860 - DNA, 18 bp, Homo sapiens
ttgcaacagtttgtttgt

SEQ ID NO: 12861 - DNA, 18 bp, Homo sapiens
ttgccagttttccctatt

SEQ ID NO: 12862 - DNA, 23 bp, Homo sapiens
ccttttaaggttcaaaaatggtt

SEQ ID NO: 12863 - DNA, 73 bp, Lettuce infectious yellows virus
cgtaattgtatcagcgaatgtacatgaatcatttatcctaactgcaatctgtgcacacgctgtagtgattgcg

SEQ ID NO: 12864 - DNA, 24 bp, Lettuce infectious yellows virus
tgtatcagcgaatgtacatgaatc

SEQ ID NO: 12865 - DNA, 18 bp, Lettuce infectious yellows virus
cacgctgtagtgattgcg

SEQ ID NO: 12866 - DNA, 20 bp, Homo sapiens
tgtgtcagcaaatgagtaga

SEQ ID NO: 12867 - DNA, 22 bp, Homo sapiens
tgtatcaagtacctgtatgaat

SEQ ID NO: 12868 - DNA, 22 bp, Homo sapiens
tgttaataccatgtacatgaat

SEQ ID NO: 12869 - DNA, 21 bp, Homo sapiens
tatgtcagctcatgtatgaat

SEQ ID NO: 12870 - DNA, 60 bp, Lettuce infectious yellows virus
gtaacggtaaaataatataaacttagtttaactcctaaagtagatctgattaattgttac

SEQ ID NO: 12871 - DNA, 23 bp, Lettuce infectious yellows virus
aagtagatctgattaattgttac

SEQ ID NO: 12872 - DNA, 24 bp, Lettuce infectious yellows virus
aacggtaaaataatataaacttag

SEQ ID NO: 12873 - DNA, 24 bp, Homo sapiens
ggatagattattgaataattgtta

SEQ ID NO: 12874 - DNA, 63 bp, Equine rhinitis A virus
gcgacaaacttgaggaccaaataatgcattggcaattgatgcggttagagcaagctttgttgt

SEQ ID NO: 12875 - DNA, 18 bp, Equine rhinitis A virus
tagagcaagctttgttgt

SEQ ID NO: 12876 - DNA, 24 bp, Equine rhinitis A virus
acaaacttgaggaccaaataatgc

SEQ ID NO: 12877 - DNA, 17 bp, Homo sapiens
caaacttgagggcaaac

SEQ ID NO: 12878 - DNA, 20 bp, Homo sapiens
aaacttgagactcataaatg

SEQ ID NO: 12879 - DNA, 17 bp, Homo sapiens
aaactaccaaataatgc

SEQ ID NO: 12880 - DNA, 15 bp, Homo sapiens
caaacttcaaataat

SEQ ID NO: 12881 - DNA, 22 bp, Homo sapiens
cagacttgaggtctaattttgc

SEQ ID NO: 12882 - DNA, 18 bp, Homo sapiens
ctgaggactggatgatgc

SEQ ID NO: 12883 - DNA, 18 bp, Homo sapiens
caaatttagggaccaaac

SEQ ID NO: 12884 - DNA, 19 bp, Homo sapiens
acttgaggactcaccatgc

SEQ ID NO: 12885 - DNA, 21 bp, Homo sapiens
aaactcacatccaaataatgc

SEQ ID NO: 12886 - DNA, 76 bp, Equine rhinitis A virus
tatgtatcctctggtactcacagacaacaatggcgaccatcttgtcttgtttgttgagcctggagacgtgtacata

SEQ ID NO: 12887 - DNA, 24 bp, Equine rhinitis A virus
tggtactcacagacaacaatggcg

SEQ ID NO: 12888 - DNA, 24 bp, Equine rhinitis A virus
tttgttgagcctggagacgtgtac

SEQ ID NO: 12889 - DNA, 21 bp, Homo sapiens
tttgttgagtttgacaaatgt

SEQ ID NO: 12890 - DNA, 20 bp, Homo sapiens
tctgttgagcaggggtgtgt

SEQ ID NO: 12891 - DNA, 71 bp, Myxoma virus
ggatactcctattacgtcgaagtcagaggtatagaactttcccctcctttttctacatgatatcccgttcc

SEQ ID NO: 12892 - DNA, 24 bp, Myxoma virus
tattacgtcgaagtcagaggtata

SEQ ID NO: 12893 - DNA, 18 bp, Myxoma virus
tacatgatatcccgttcc

SEQ ID NO: 12894 - DNA, 19 bp, Homo sapiens
gcacgaagtcagaggtata

SEQ ID NO: 12895 - DNA, 20 bp, Homo sapiens
acatgacatcattttgttcc

SEQ ID NO: 12896 - DNA, 15 bp, Homo sapiens
tacatgacagcctcc

SEQ ID NO: 12897 - DNA, 15 bp, Homo sapiens
tacataataccttcc

SEQ ID NO: 12898 - DNA, 17 bp, Homo sapiens
tacatgatagcaattcc

SEQ ID NO: 12899 - DNA, 17 bp, Homo sapiens
caccgacttcccgttcc

SEQ ID NO: 12900 - DNA, 18 bp, Homo sapiens
tgaacatccctttgttcc

SEQ ID NO: 12901 - DNA, 78 bp, Myxoma virus
accactataatccccgcttcctataatctctacttcctatgattaaatgggtaattaaatgatgggtaattaagtggt

SEQ ID NO: 12902 - DNA, 24 bp, Myxoma virus
tataatccccgcttcctataatct

SEQ ID NO: 12903 - DNA, 24 bp, Myxoma virus
taattaaatgatgggtaattaagt

SEQ ID NO: 12904 - DNA, 27 bp, Homo sapiens
tataatccttacttctaaccaaaatct

SEQ ID NO: 12905 - DNA, 18 bp, Homo sapiens
tctcctcctctataatct

SEQ ID NO: 12906 - DNA, 18 bp, Homo sapiens
taattaaatgaaattaag

SEQ ID NO: 12907 - DNA, 83 bp, Myxoma virus
gaggatgtcatcgtgcgtagtcttcccagttgtcccgcgcttatgggaatggggtctttgaagactatccacgtcacgttttt

SEQ ID NO: 12908 - DNA, 24 bp, Myxoma virus
catcgtgcgtagtcttcccagttg

SEQ ID NO: 12909 - DNA, 24 bp, Myxoma virus
ttgaagactatccacgtcacgttt

SEQ ID NO: 12910 - DNA, 20 bp, Homo sapiens
tacagcagtctttccagttg

SEQ ID NO: 12911 - DNA, 18 bp, Homo sapiens
ctgaagactgttcatgcc

SEQ ID NO: 12912 - DNA, 60 bp, Fowlpox virus
ttcatcaattaatgcctattatgatgtagtctctgcgcataggtatgatttgaagttgag

SEQ ID NO: 12913 - DNA, 24 bp, Fowlpox virus
ttaatgcctattatgatgtagtct

SEQ ID NO: 12914 - DNA, 24 bp, Fowlpox virus
gcgcataggtatgatttgaagttg

SEQ ID NO: 12915 - DNA, 21 bp, Homo sapiens
tgcctattcactgggtggtct

SEQ ID NO: 12916 - DNA, 18 bp, Homo sapiens
ttaatgcctattcagagt

SEQ ID NO: 12917 - DNA, 78 bp, Fowlpox virus
ctcgccggggctctagaatacaaaatgcgcacggacgctcgtataaactcgcgcatttttatttgaagttaaatcgag

SEQ ID NO: 12918 - DNA, 24 bp, Fowlpox virus
tagaatacaaaatgcgcacggacg

SEQ ID NO: 12919 - DNA, 24 bp, Fowlpox virus
gcgcatttttatttgaagttaaat

SEQ ID NO: 12920 - DNA, 21 bp, Homo sapiens
taaaatgcaaagtacactgga

SEQ ID NO: 12921 - DNA, 19 bp, Homo sapiens
gaatacaaaccacggcgga

SEQ ID NO: 12922 - DNA, 76 bp, Fowlpox virus
aatcgcgccgtagagacacgtacgcgttgtattaacacatactggaaagaacatcgcgcacagctacggcgggatt

SEQ ID NO: 12923 - DNA, 18 bp, Fowlpox virus
cacagctacggcgggatt

SEQ ID NO: 12924 - DNA, 24 bp, Fowlpox virus
cgccgtagagacacgtacgcgttg

SEQ ID NO: 12925 - DNA, 14 bp, Homo sapiens
cacagctcaggatt

SEQ ID NO: 12926 - DNA, 20 bp, Homo sapiens
acagctacctgatggggatt

SEQ ID NO: 12927 - DNA, 20 bp, Homo sapiens
cacagttcccacacaggatt

SEQ ID NO: 12928 - DNA, 17 bp, Homo sapiens
cacactaggacaggatt

SEQ ID NO: 12929 - DNA, 16 bp, Homo sapiens
cacagctaatgggact

SEQ ID NO: 12930 - DNA, 17 bp, Homo sapiens
cacagcaaactaggatt

SEQ ID NO: 12931 - DNA, 18 bp, Homo sapiens
cacagccacacctagatt

SEQ ID NO: 12932 - DNA, 17 bp, Homo sapiens
cacagccaaacgcgatt

SEQ ID NO: 12933 - DNA, 18 bp, Homo sapiens
cacagcagcacatggatt

SEQ ID NO: 12934 - DNA, 18 bp, Homo sapiens
cacagcagcaaaaagatt

SEQ ID NO: 12935 - DNA, 18 bp, Homo sapiens
cacaactactaagagatt

SEQ ID NO: 12936 - DNA, 16 bp, Homo sapiens
cacagccaccagaatt

SEQ ID NO: 12937 - DNA, 94 bp, Fowlpox virus
aggccctgttttattaacaacattaaagcattctcagaggaaaggtttaaccacagctgagtgccttttatgttgtttgcttaatataggccct

SEQ ID NO: 12938 - DNA, 24 bp, Fowlpox virus
gccctgttttattaacaacattaa

SEQ ID NO: 12939 - DNA, 24 bp, Fowlpox virus
tatgttgtttgcttaatataggcc

SEQ ID NO: 12940 - DNA, 20 bp, Homo sapiens
gctctgctttattgacctca

SEQ ID NO: 12941 - DNA, 22 bp, Homo sapiens
gccttgttttataaatacacat

SEQ ID NO: 12942 - DNA, 20 bp, Homo sapiens
tgtgtgtttgcttcattggc

SEQ ID NO: 12943 - DNA, 20 bp, Homo sapiens
tgttgtttgtttgagacagg

SEQ ID NO: 12944 - DNA, 21 bp, Homo sapiens
tgtgtttttcatttataggcc

SEQ ID NO: 12945 - DNA, 22 bp, Homo sapiens
tacgttgtgcattgatatgggc

SEQ ID NO: 12946 - DNA, 18 bp, Homo sapiens
tgcatgtttgatataggc

SEQ ID NO: 12947 - DNA, 75 bp, Fowlpox virus
tcctttttgtgctatgtcggagttacaaacaaatccacaaattttatttgcccatcctacatttacaaacaagga

SEQ ID NO: 12948 - DNA, 24 bp, Fowlpox virus
tttgtgctatgtcggagttacaaa

SEQ ID NO: 12949 - DNA, 24 bp, Fowlpox virus
tttgcccatcctacatttacaaac

SEQ ID NO: 12950 - DNA, 16 bp, Homo sapiens
tttatacctcggggtt

SEQ ID NO: 12951 - DNA, 20 bp, Homo sapiens
tttgtgctacgttttgtgag

SEQ ID NO: 12952 - DNA, 20 bp, Homo sapiens
tttgtgctgtgcaccaacaa

SEQ ID NO: 12953 - DNA, 18 bp, Homo sapiens
tgctgtggcagttacaaa

SEQ ID NO: 12954 - DNA, 18 bp, Homo sapiens
tttgttagttgagttaca

SEQ ID NO: 12955 - DNA, 15 bp, Homo sapiens
ttgtgctatggggtt

SEQ ID NO: 12956 - DNA, 20 bp, Homo sapiens
tttgtgctgtgcactaacaa

SEQ ID NO: 12957 - DNA, 22 bp, Homo sapiens
tttgcctactccttcccacaaa

SEQ ID NO: 12958 - DNA, 19 bp, Homo sapiens
tttgctttccaactacaaa

SEQ ID NO: 12959 - DNA, 20 bp, Homo sapiens
tttgctaccctgtttacaaa

SEQ ID NO: 12960 - DNA, 18 bp, Homo sapiens
tttgcccatgttcataca

SEQ ID NO: 12961 - DNA, 21 bp, Homo sapiens
tttgccatcttttccacaaac

SEQ ID NO: 12962 - DNA, 26 bp, Homo sapiens
tttgcccattagaatttgtttacaaa

SEQ ID NO: 12963 - DNA, 18 bp, Homo sapiens
tttgcccatcactatatc

SEQ ID NO: 12964 - DNA, 22 bp, Homo sapiens
tttgcccatgttatattacaaa

SEQ ID NO: 12965 - DNA, 24 bp, Homo sapiens
tttgcccatctctggggcacgaac

SEQ ID NO: 12966 - DNA, 18 bp, Homo sapiens
cctaccacatttacaaac

SEQ ID NO: 12967 - DNA, 21 bp, Homo sapiens
tttgccacattcttcacattt

SEQ ID NO: 12968 - DNA, 61 bp, Camelpox virus
gccgcagacactgtggcggacgtgaacccgactgggagtatcacgtccaccgactctgggc

SEQ ID NO: 12969 - DNA, 23 bp, Camelpox virus
tatcacgtccaccgactctgggc

SEQ ID NO: 12970 - DNA, 24 bp, Camelpox virus
acactgtggcggacgtgaacccga

SEQ ID NO: 12971 - DNA, 16 bp, Homo sapiens
actgtggcggcgcccg

SEQ ID NO: 12972 - DNA, 23 bp, Homo sapiens
ggactgtggcgctgcaggctcga

SEQ ID NO: 12973 - DNA, 17 bp, Homo sapiens
acattgtggcagcagga

SEQ ID NO: 12974 - DNA, 15 bp, Homo sapiens
ctgggcgcggaagcc

SEQ ID NO: 12975 - DNA, 18 bp, Homo sapiens
acaccgtggtgagaagcc

SEQ ID NO: 12976 - DNA, 17 bp, Homo sapiens
ctgcggcgggcgctgcg

SEQ ID NO: 12977 - DNA, 20 bp, Homo sapiens
ctgcggcggcggcagactcg

SEQ ID NO: 12978 - DNA, 20 bp, Homo sapiens
acacgtggcaagcggacccg

SEQ ID NO: 12979 - DNA, 21 bp, Homo sapiens
ctgtggcggcttcgggtccga

SEQ ID NO: 12980 - DNA, 23 bp, Homo sapiens
cgactgtggcgcgcggagtccga

SEQ ID NO: 12981 - DNA, 17 bp, Homo sapiens
tgtggcagagggacccg

SEQ ID NO: 12982 - DNA, 19 bp, Homo sapiens
ctgtggcgaggagacccga

SEQ ID NO: 12983 - DNA, 88 bp, Camelpox virus
gccggttagtatgacttacttgtataataagtatagttttaaactgattttagcagaatatataagacacagaaatactgtatccggc

SEQ ID NO: 12984 - DNA, 24 bp, Camelpox virus
taagacacagaaatactgtatccg

SEQ ID NO: 12985 - DNA, 24 bp, Camelpox virus
tagtatgacttacttgtataataa

SEQ ID NO: 12986 - DNA, 19 bp, Homo sapiens
gacacagagaaacagtatc

SEQ ID NO: 12987 - DNA, 22 bp, Homo sapiens
aggcacagaaacttggtgtgtc

SEQ ID NO: 12988 - DNA, 19 bp, Homo sapiens
taagacacaaaatgaatcc

SEQ ID NO: 12989 - DNA, 23 bp, Homo sapiens
gacacagaaaagctcctatctcg

SEQ ID NO: 12990 - DNA, 18 bp, Homo sapiens
taagacacaggcatagcc

SEQ ID NO: 12991 - DNA, 18 bp, Homo sapiens
caagatacagaaatgctg

SEQ ID NO: 12992 - DNA, 18 bp, Homo sapiens
taatatgacttatgaata

SEQ ID NO: 12993 - DNA, 25 bp, Homo sapiens
tagtatacaattttttgtataataa

SEQ ID NO: 12994 - DNA, 68 bp, Fowlpox virus
ctcatatggtgctcattacgttcaagtgttgaaggatccaatagccttgaactgtggtgccatgtgag

SEQ ID NO: 12995 - DNA, 24 bp, Fowlpox virus
tagccttgaactgtggtgccatgt

SEQ ID NO: 12996 - DNA, 24 bp, Fowlpox virus
catatggtgctcattacgttcaag

SEQ ID NO: 12997 - DNA, 18 bp, Homo sapiens
tgagtgctctgcttcaag

SEQ ID NO: 12998 - DNA, 62 bp, Fowlpox virus
atccacgttatctctgattgtcaaaatagactagtctaggagacgataaatcctatgtgggt

SEQ ID NO: 12999 - DNA, 24 bp, Fowlpox virus
taggagacgataaatcctatgtgg

SEQ ID NO: 13000 - DNA, 24 bp, Fowlpox virus
cacgttatctctgattgtcaaaat

SEQ ID NO: 13001 - DNA, 21 bp, Homo sapiens
gttatgcctaattgtcaaaat

SEQ ID NO: 13002 - DNA, 17 bp, Homo sapiens
gttttctctgatgcaaa

SEQ ID NO: 13003 - DNA, 64 bp, Fowlpox virus
gcgttgagggataagagtagcatgttcctacttaaggaaggaatatgtcgtgttttccacacgt

SEQ ID NO: 13004 - DNA, 19 bp, Fowlpox virus
tgtcgtgttttccacacgt

SEQ ID NO: 13005 - DNA, 24 bp, Fowlpox virus
tgagggataagagtagcatgttcc

SEQ ID NO: 13006 - DNA, 20 bp, Homo sapiens
tgaggacacctggcatgttc

SEQ ID NO: 13007 - DNA, 22 bp, Homo sapiens
tgaaaattaagagtagcatgtt

SEQ ID NO: 13008 - DNA, 18 bp, Homo sapiens
tgaggggcaagagtatgc

SEQ ID NO: 13009 - DNA, 20 bp, Homo sapiens
tgaggggtgagggcacgtcc

SEQ ID NO: 13010 - DNA, 22 bp, Homo sapiens
gggataagcaaaggagtgtgtt

SEQ ID NO: 13011 - DNA, 19 bp, Homo sapiens
tgagggacaagggtggggc

SEQ ID NO: 13012 - DNA, 61 bp, Fowlpox virus
acttgtgtactttctaggggctcccggccttccttccggtacaatacctagtgaagcaagt

SEQ ID NO: 13013 - DNA, 20 bp, Fowlpox virus
caatacctagtgaagcaagt

SEQ ID NO: 13014 - DNA, 24 bp, Fowlpox virus
actttctaggggctcccggccttc

SEQ ID NO: 13015 - DNA, 22 bp, Homo sapiens
ctctctccctctttccggcctt

SEQ ID NO: 13016 - DNA, 20 bp, Homo sapiens
tttctaggggcttccaaagc

SEQ ID NO: 13017 - DNA, 15 bp, Homo sapiens
actttctagcggcct

SEQ ID NO: 13018 - DNA, 17 bp, Homo sapiens
ctttctagggtggcctt

SEQ ID NO: 13019 - DNA, 19 bp, Homo sapiens
tttctaggggctgggcctt

SEQ ID NO: 13020 - DNA, 25 bp, Homo sapiens
ctttctagggctctcaataatcttc

SEQ ID NO: 13021 - DNA, 25 bp, Homo sapiens
ccttctagcttgattcttggccttc

SEQ ID NO: 13022 - DNA, 21 bp, Homo sapiens
actttctagtggtttctatgc

SEQ ID NO: 13023 - DNA, 21 bp, Homo sapiens
ctttctaggtaaacggtcttc

SEQ ID NO: 13024 - DNA, 100 bp, Fowlpox virus
atcgttagcacaccttaaagattagaagaaatacaggttagtgtaataataacgtattattatctagcacaaaaatgtttcaaagggcgtgttattagat

SEQ ID NO: 13025 - DNA, 24 bp, Fowlpox virus
tagcacaccttaaagattagaaga

SEQ ID NO: 13026 - DNA, 20 bp, Fowlpox virus
caaagggcgtgttattagat

SEQ ID NO: 13027 - DNA, 18 bp, Homo sapiens
tagtgacctcattagaag

SEQ ID NO: 13028 - DNA, 18 bp, Homo sapiens
gcataccccggttagaag

SEQ ID NO: 13029 - DNA, 23 bp, Homo sapiens
tagctcatcttaaattaaaaaga

SEQ ID NO: 13030 - DNA, 21 bp, Homo sapiens
tagcatgcattaaagaccaga

SEQ ID NO: 13031 - DNA, 18 bp, Homo sapiens
agcatagcagattagaag

SEQ ID NO: 13032 - DNA, 18 bp, Homo sapiens
acattaaaagattagaag

SEQ ID NO: 13033 - DNA, 22 bp, Homo sapiens
cagcacactttgagatggctag

SEQ ID NO: 13034 - DNA, 18 bp, Homo sapiens
cagcacatggattagaag

SEQ ID NO: 13035 - DNA, 20 bp, Homo sapiens
caaagagtgcaaagttagat

SEQ ID NO: 13036 - DNA, 19 bp, Homo sapiens
gggtgtgttactgttagat

SEQ ID NO: 13037 - DNA, 19 bp, Homo sapiens
aagagacactttattagat

SEQ ID NO: 13038 - DNA, 17 bp, Homo sapiens
aaaggcatttattagat

SEQ ID NO: 13039 - DNA, 18 bp, Homo sapiens
ggaagggcgtggtctcag

SEQ ID NO: 13040 - DNA, 16 bp, Homo sapiens
caaagggctgcctcag

SEQ ID NO: 13041 - DNA, 20 bp, Homo sapiens
aaagggcaacagtattggat

SEQ ID NO: 13042 - DNA, 68 bp, Fowlpox virus
gttaaattacgtgattatattataagttatctgcttactttaacattatatagtaattatatactaac

SEQ ID NO: 13043 - DNA, 24 bp, Fowlpox virus
cgtgattatattataagttatctg

SEQ ID NO: 13044 - DNA, 18 bp, Fowlpox virus
tagtaattatatactaac

SEQ ID NO: 13045 - DNA, 24 bp, Homo sapiens
gtgattatgctgtaataaaatctg

SEQ ID NO: 13046 - DNA, 24 bp, Homo sapiens
gtgattataaataacagttatctg

SEQ ID NO: 13047 - DNA, 62 bp, Fowlpox virus
ctgtatttcttctaatctttaaggtgtgctaacgatatatcacgggattaaaaggttattag

SEQ ID NO: 13048 - DNA, 24 bp, Fowlpox virus
tatcacgggattaaaaggttatta

SEQ ID NO: 13049 - DNA, 24 bp, Fowlpox virus
tctaatctttaaggtgtgctaacg

SEQ ID NO: 13050 - DNA, 17 bp, Homo sapiens
tcacaatgtaaaaggtt

SEQ ID NO: 13051 - DNA, 25 bp, Homo sapiens
tatcacaggattaaaactccagtta

SEQ ID NO: 13052 - DNA, 17 bp, Homo sapiens
tctgtctttaaggagtg

SEQ ID NO: 13053 - DNA, 23 bp, Homo sapiens
tctaatcttatttcaggttagtg

SEQ ID NO: 13054 - DNA, 22 bp, Homo sapiens
caatattcggggtgtgctgacg

SEQ ID NO: 13055 - DNA, 131 bp, Rabbit fibroma virus
tgtcatcagtgttgtcagggtcctgtgggccattgtcatcagtgttgtcagggtcctgaggcagcgggtcatgtgggccattgtcatcagtgttgtcagggtcctgtgggccattgtcatcagtgttgtca

SEQ ID NO: 13056 - DNA, 24 bp, Rabbit fibroma virus
ggccattgtcatcagtgttgtcag

SEQ ID NO: 13057 - DNA, 24 bp, Rabbit fibroma virus
atgtgggccattgtcatcagtgtt

SEQ ID NO: 13058 - DNA, 22 bp, Homo sapiens
ggccattgtttctggatgtcag

SEQ ID NO: 13059 - DNA, 18 bp, Homo sapiens
ggctgttggttgttgtca

SEQ ID NO: 13060 - DNA, 17 bp, Homo sapiens
ggtcatttcatcagcat

SEQ ID NO: 13061 - DNA, 23 bp, Homo sapiens
atgtggaccttcctatcagtgtt

SEQ ID NO: 13062 - DNA, 79 bp, Rabbit fibroma virus
gcggagtctggcaacgcccgggtccttgctacctgtgtggtgtgttaagggctgggtaaaggtgtctgccaattctcgc

SEQ ID NO: 13063 - DNA, 24 bp, Rabbit fibroma virus
tgtgttaagggctgggtaaaggtg

SEQ ID NO: 13064 - DNA, 24 bp, Rabbit fibroma virus
tctggcaacgcccgggtccttgct

SEQ ID NO: 13065 - DNA, 21 bp, Homo sapiens
gccaggggctgggtggaggtg

SEQ ID NO: 13066 - DNA, 23 bp, Homo sapiens
tctggcagccctccgtgcttgct

SEQ ID NO: 13067 - DNA, 21 bp, Homo sapiens
tctggcatcgcccggagagct

SEQ ID NO: 13068 - DNA, 18 bp, Homo sapiens
ggcaatgtcccccttgct

SEQ ID NO: 13069 - DNA, 25 bp, Homo sapiens
tctggcaatgtctctggtttttgct

SEQ ID NO: 13070 - DNA, 18 bp, Homo sapiens
tctagcagtgcccgggcc

SEQ ID NO: 13071 - DNA, 21 bp, Homo sapiens
cggcagcgcccgggtctggct

SEQ ID NO: 13072 - DNA, 21 bp, Homo sapiens
tctggtggcccttaaattgct

SEQ ID NO: 13073 - DNA, 76 bp, Rabbit fibroma virus
gcatctccaataagtagatccagatacctaagactgcgttgaaaaaagagtgttagggttggaaaagtgggggtgt

SEQ ID NO: 13074 - DNA, 24 bp, Rabbit fibroma virus
tctccaataagtagatccagatac

SEQ ID NO: 13075 - DNA, 24 bp, Rabbit fibroma virus
tgttagggttggaaaagtgggggt

SEQ ID NO: 13076 - DNA, 18 bp, Homo sapiens
ggtagaggaaagtggggg

SEQ ID NO: 13077 - DNA, 22 bp, Homo sapiens
tgtttggggtgggggtgggggt

SEQ ID NO: 13078 - DNA, 17 bp, Homo sapiens
ggtgttggggtgggggt

SEQ ID NO: 13079 - DNA, 19 bp, Homo sapiens
tgttggtgttgggacaggg

SEQ ID NO: 13080 - DNA, 15 bp, Homo sapiens
tgtagggttggggag

SEQ ID NO: 13081 - DNA, 17 bp, Homo sapiens
tgtgggggttggggagg

SEQ ID NO: 13082 - DNA, 22 bp, Homo sapiens
tgctggggttgggggccagggt

SEQ ID NO: 13083 - DNA, 21 bp, Homo sapiens
tgtcggggaaggggtgggggt

SEQ ID NO: 13084 - DNA, 90 bp, Simian immunodeficiency virus
tttgactatttcgaaagagttattaacagttaccgtcaatgcgttggagcaagcgacggtgtatcctatattcggaagtgagatgtcaga

SEQ ID NO: 13085 - DNA, 24 bp, Simian immunodeficiency virus
tatttcgaaagagttattaacagt

SEQ ID NO: 13086 - DNA, 24 bp, Monkeypox virus
aagcgacggtgtatcctatattcg

SEQ ID NO: 13087 - DNA, 15 bp, Homo sapiens
tttcgaagattaaca

SEQ ID NO: 13088 - DNA, 92 bp, Simian immunodeficiency virus
gacccctttataagatttacagacgattttagaggagaaatgatcaatacttttttcaataatgctcagatgtggaattttacgttcgggtc

SEQ ID NO: 13089 - DNA, 24 bp, Simian immunodeficiency virus
tataagatttacagacgattttag

SEQ ID NO: 13090 - DNA, 24 bp, Simian immunodeficiency virus
ttcaataatgctcagatgtggaat

SEQ ID NO: 13091 - DNA, 21 bp, Homo sapiens
taagattttaacagtgatttt

SEQ ID NO: 13092 - DNA, 118 bp, Lymphocystis disease virus 1
gcgatggtaggtcagtggtaatatgaccagccgtgttgattgttccattgggctccactttaccgatgatgctgtcagcaaacatttgtctaaatatgtgccacaattcactgttcgc

SEQ ID NO: 13093 - DNA, 24 bp, Lymphocystis disease virus 1
agtggtaatatgaccagccgtgtt

SEQ ID NO: 13094 - DNA, 24 bp, Lymphocystis disease virus 1
tgtcagcaaacatttgtctaaata

SEQ ID NO: 13095 - DNA, 18 bp, Homo sapiens
aggggtaatatggccatt

SEQ ID NO: 13096 - DNA, 75 bp, Monkeypox virus
aagcgcaagagtcccaacattcctcatacagagactgtagactttgtatgggggtttaatgttgagactcgcctt

SEQ ID NO: 13097 - DNA, 24 bp, Monkeypox virus
tatgggggtttaatgttgagactc

SEQ ID NO: 13098 - DNA, 24 bp, Monkeypox virus
caacattcctcatacagagactgt

SEQ ID NO: 13099 - DNA, 16 bp, Homo sapiens
tgggggttttgcggag

SEQ ID NO: 13100 - DNA, 16 bp, Homo sapiens
tgggggtttcattcag

SEQ ID NO: 13101 - DNA, 18 bp, Homo sapiens
caacatcctcatgcccag

SEQ ID NO: 13102 - DNA, 23 bp, Homo sapiens
caacattcttacataacatctgt

SEQ ID NO: 13103 - DNA, 18 bp, Homo sapiens
ttcctcatctgacactgt

SEQ ID NO: 13104 - DNA, 18 bp, Homo sapiens
cattcctcatgagggtgt

SEQ ID NO: 13105 - DNA, 20 bp, Homo sapiens
cattcctcgattgaccctgt

SEQ ID NO: 13106 - DNA, 17 bp, Homo sapiens
ttcttcagagagactgt

SEQ ID NO: 13107 - DNA, 19 bp, Homo sapiens
caaaattcctcatctgctg

SEQ ID NO: 13108 - DNA, 23 bp, Homo sapiens
tgacattcgtaagtggagactgt

SEQ ID NO: 13109 - DNA, 21 bp, Homo sapiens
caacagtcaagtggagactgt

SEQ ID NO: 13110 - DNA, 18 bp, Homo sapiens
tcacagcgtagagactgt

SEQ ID NO: 13111 - DNA, 18 bp, Homo sapiens
caacattcttcagacaga

SEQ ID NO: 13112 - DNA, 84 bp, Monkeypox virus
gactatttcaaaagagttactagcagttaccgtcaatgcgttggagcaagcgacggtgtatcctatattcggaagtgaaatgtc

SEQ ID NO: 13113 - DNA, 24 bp, Monkeypox virus
tatttcaaaagagttactagcagt

SEQ ID NO: 13114 - DNA, 18 bp, Homo sapiens
agcgacaggtgtgttcct

SEQ ID NO: 13115 - DNA, 21 bp, Homo sapiens
ggcggttcctatttatattcg

SEQ ID NO: 13116 - DNA, 20 bp, Homo sapiens
aacacccagtgtcctatatt

SEQ ID NO: 13117 - DNA, 101 bp, Paramecium bursaria Chlorella virus 1
ccagtgtgctctgggcgccggacgtggagatcagcacggtccgccggcacagcgcggcggtccgcgctttcgcgtcggctctcaggaactacatgttttgg

SEQ ID NO: 13118 - DNA, 24 bp, Paramecium bursaria Chlorella virus 1
cggtccgcgctttcgcgtcggctc

SEQ ID NO: 13119 - DNA, 24 bp, Paramecium bursaria Chlorella virus 1
ggacgtggagatcagcacggtccg

SEQ ID NO: 13120 - DNA, 24 bp, Homo sapiens
ggacgtggggaacacagggacggt

SEQ ID NO: 13121 - DNA, 19 bp, Homo sapiens
gggttggaggaagacggtc

SEQ ID NO: 13122 - DNA, 16 bp, Homo sapiens
ggctggagatcggccg

SEQ ID NO: 13123 - DNA, 18 bp, Homo sapiens
gaacgtggggattggtcc

SEQ ID NO: 13124 - DNA, 23 bp, Homo sapiens
ggacgtgaggattggaggatccg

SEQ ID NO: 13125 - DNA, 20 bp, Homo sapiens
ggacgtgggtgtcgggagtc

SEQ ID NO: 13126 - DNA, 104 bp, Paramecium bursaria Chlorella virus 1
gtcttctctatctactggcagggccactccgagttggtctacatccttacgggtctcacacactgcacgaaactagtggtcgaatgtgggcagatgaaggggac

SEQ ID NO: 13127 - DNA, 24 bp, Paramecium bursaria Chlorella virus 1
tgcacgaaactagtggtcgaatgt

SEQ ID NO: 13128 - DNA, 24 bp, Paramecium bursaria Chlorella virus 1
tctatctactggcagggccactcc

SEQ ID NO: 13129 - DNA, 18 bp, Homo sapiens
tcaatctccagggccact

SEQ ID NO: 13130 - DNA, 18 bp, Homo sapiens
tatccactaaaagctgct

SEQ ID NO: 13131 - DNA, 21 bp, Homo sapiens
cctatctactggccccactcc

SEQ ID NO: 13132 - DNA, 17 bp, Homo sapiens
tctatctatgacccact

SEQ ID NO: 13133 - DNA, 21 bp, Homo sapiens
tctatctactgtgtcccaggc

SEQ ID NO: 13134 - DNA, 21 bp, Homo sapiens
tctatctactgtgtcccaagc

SEQ ID NO: 13135 - DNA, 18 bp, Homo sapiens
tctgtccacttgccgctc

SEQ ID NO: 13136 - DNA, 18 bp, Homo sapiens
ctggatcagggccactcc

SEQ ID NO: 13137 - DNA, 19 bp, Homo sapiens
tctatgtacagggccactc

SEQ ID NO: 13138 - DNA, 61 bp, Paramecium bursaria Chlorella virus 1
cggaatctatatgattcgggtctcggacgggaatatgggtccgaggaacgtggtatggccg

SEQ ID NO: 13139 - DNA, 24 bp, Paramecium bursaria Chlorella virus 1
tgattcgggtctcggacgggaata

SEQ ID NO: 13140 - DNA, 20 bp, Paramecium bursaria Chlorella virus 1
cgaggaacgtggtatggccg

SEQ ID NO: 13141 - DNA, 15 bp, Homo sapiens
cgaggaactgccagc

SEQ ID NO: 13142 - DNA, 19 bp, Homo sapiens
aaggaatgtcacagggccg

SEQ ID NO: 13143 - DNA, 15 bp, Homo sapiens
cggggaacgcggacc

SEQ ID NO: 13144 - DNA, 16 bp, Homo sapiens
cgggagcgcacggccg

SEQ ID NO: 13145 - DNA, 14 bp, Homo sapiens
aaggaacattggcc

SEQ ID NO: 13146 - DNA, 17 bp, Homo sapiens
cgagaaacggactcggc

SEQ ID NO: 13147 - DNA, 17 bp, Homo sapiens
cgggagccgcatggccg

SEQ ID NO: 13148 - DNA, 19 bp, Homo sapiens
gggtggtggtgcatggccg

SEQ ID NO: 13149 - DNA, 18 bp, Homo sapiens
gaggggcgtgggcatggc

SEQ ID NO: 13150 - DNA, 18 bp, Homo sapiens
cgaggagggtcacagccg

SEQ ID NO: 13151 - DNA, 18 bp, Homo sapiens
cgagcagccacatggccg

SEQ ID NO: 13152 - DNA, 18 bp, Homo sapiens
cgaggaactgtgagcttg

SEQ ID NO: 13153 - DNA, 17 bp, Homo sapiens
gaggagggccacggccg

SEQ ID NO: 13154 - DNA, 65 bp, Paramecium bursaria Chlorella virus 1
tgcctgcacaagtaccaggaggggctgtcgactatcgagcagctgcaatcggtgctacagcagca

SEQ ID NO: 13155 - DNA, 24 bp, Paramecium bursaria Chlorella virus 1
caagtaccaggaggggctgtcgac

SEQ ID NO: 13156 - DNA, 22 bp, Paramecium bursaria Chlorella virus 1
tgcaatcggtgctacagcagca

SEQ ID NO: 13157 - DNA, 20 bp, Homo sapiens
ccggtttcactacagcagca

SEQ ID NO: 13158 - DNA, 21 bp, Homo sapiens
tgcagtcagcactgagcagca

SEQ ID NO: 13159 - DNA, 22 bp, Homo sapiens
tgcagtgatctaagcagcagca

SEQ ID NO: 13160 - DNA, 17 bp, Homo sapiens
tacaattgtccagcagc

SEQ ID NO: 13161 - DNA, 18 bp, Homo sapiens
acctcagctgcagcagca

SEQ ID NO: 13162 - DNA, 21 bp, Homo sapiens
tgcgtttgtcacacagcagca

SEQ ID NO: 13163 - DNA, 16 bp, Homo sapiens
gcagtcgagcagcagc

SEQ ID NO: 13164 - DNA, 19 bp, Homo sapiens
tacaaaaatattacagcag

SEQ ID NO: 13165 - DNA, 20 bp, Homo sapiens
gcaattttattacagcagca

SEQ ID NO: 13166 - DNA, 19 bp, Homo sapiens
cggtccttgggcagcagca

SEQ ID NO: 13167 - DNA, 18 bp, Homo sapiens
tacagtctacacagcagc

SEQ ID NO: 13168 - DNA, 19 bp, Homo sapiens
tcagcaaactttacagcag

SEQ ID NO: 13169 - DNA, 17 bp, Homo sapiens
gcaaatgtctacagcag

SEQ ID NO: 13170 - DNA, 22 bp, Homo sapiens
tgcggcggtcgccgcagcagca

SEQ ID NO: 13171 - DNA, 16 bp, Homo sapiens
tgcaatcgctgctgca

SEQ ID NO: 13172 - DNA, 24 bp, Homo sapiens
tgaaatcggtaacctttagcagca

SEQ ID NO: 13173 - DNA, 19 bp, Homo sapiens
tgcacgtcgcccggcggca

SEQ ID NO: 13174 - DNA, 17 bp, Homo sapiens
tgcggtcagtgctggca

SEQ ID NO: 13175 - DNA, 21 bp, Homo sapiens
tgaaatcgtaaaacagcagca

SEQ ID NO: 13176 - DNA, 14 bp, Homo sapiens
tgaatcaatagcag

SEQ ID NO: 13177 - DNA, 18 bp, Homo sapiens
tgcaactctgcagcagca

SEQ ID NO: 13178 - DNA, 19 bp, Homo sapiens
tgtaaccattacacagcag

SEQ ID NO: 13179 - DNA, 18 bp, Homo sapiens
ccgagacctgcagcagca

SEQ ID NO: 13180 - DNA, 68 bp, Feline foamy virus
gactaaacttcctggggactagaggtgtggaaactttgctgcctctgcttcacgggaagtttttggtt

SEQ ID NO: 13181 - DNA, 24 bp, Feline foamy virus
taaacttcctggggactagaggtg

SEQ ID NO: 13182 - DNA, 18 bp, Feline foamy virus
cacgggaagtttttggtt

SEQ ID NO: 13183 - DNA, 21 bp, Homo sapiens
actgggctggggctgggggtg

SEQ ID NO: 13184 - DNA, 18 bp, Homo sapiens
cttcctgggaggaaggtg

SEQ ID NO: 13185 - DNA, 17 bp, Homo sapiens
tcctggggatccctgtg

SEQ ID NO: 13186 - DNA, 20 bp, Homo sapiens
cttcctggcttctgggggtg

SEQ ID NO: 13187 - DNA, 20 bp, Homo sapiens
aactactagggttaggggtg

SEQ ID NO: 13188 - DNA, 18 bp, Homo sapiens
ctccccgggctggaggtg

SEQ ID NO: 13189 - DNA, 19 bp, Homo sapiens
cttcctggaggcggaggtg

SEQ ID NO: 13190 - DNA, 20 bp, Homo sapiens
cctcctgaatagtagaggtg

SEQ ID NO: 13191 - DNA, 18 bp, Homo sapiens
ttcccagggctggaggtg

SEQ ID NO: 13192 - DNA, 60 bp, Paramecium bursaria Chlorella virus 1
cctggagatgatgctgacagtatgattttttacaaagtaactgttgttgatcccatactc

SEQ ID NO: 13193 - DNA, 24 bp, Paramecium bursaria Chlorella virus 1
tgatgctgacagtatgatttttta

SEQ ID NO: 13194 - DNA, 24 bp, Paramecium bursaria Chlorella virus 1
aagtaactgttgttgatcccatac

SEQ ID NO: 13195 - DNA, 20 bp, Homo sapiens
tgatgctgtagtactccttt

SEQ ID NO: 13196 - DNA, 20 bp, Homo sapiens
aagtaactggtggtttttcc

SEQ ID NO: 13197 - DNA, 17 bp, Homo sapiens
aagtagtgttgttgatc

SEQ ID NO: 13198 - DNA, 16 bp, Homo sapiens
gcaactgttgtccccc

SEQ ID NO: 13199 - DNA, 19 bp, Homo sapiens
aactaactgtgttcccata

SEQ ID NO: 13200 - DNA, 83 bp, Paramecium bursaria Chlorella virus 1
cattgtcggtgtgctttcgggattagcagtcataatcatctgcatgttcatttttgcttgctgctatagaaggctttaccgac

SEQ ID NO: 13201 - DNA, 22 bp, Paramecium bursaria Chlorella virus 1
tgctatagaaggctttaccgac

SEQ ID NO: 13202 - DNA, 24 bp, Paramecium bursaria Chlorella virus 1
tcggtgtgctttcgggattagcag

SEQ ID NO: 13203 - DNA, 15 bp, Homo sapiens
tgctatagcttaccg

SEQ ID NO: 13204 - DNA, 17 bp, Homo sapiens
tgcatagaaggcttacc

SEQ ID NO: 13205 - DNA, 19 bp, Homo sapiens
tgctaggggctccactgac

SEQ ID NO: 13206 - DNA, 17 bp, Homo sapiens
tgcgtagaaggctcccg

SEQ ID NO: 13207 - DNA, 18 bp, Homo sapiens
tgctgtagcgggctctac

SEQ ID NO: 13208 - DNA, 18 bp, Homo sapiens
tgttataaaaggtttcac

SEQ ID NO: 13209 - DNA, 22 bp, Homo sapiens
tgctacagagcagaccattgac

SEQ ID NO: 13210 - DNA, 75 bp, Meleagrid herpesvirus 1
ctccgatctcgagccgcagcccggcggtgtctctttcagtggagcgttagcgccatcatgtggttcgtggcggtg

SEQ ID NO: 13211 - DNA, 24 bp, Meleagrid herpesvirus 1
ttagcgccatcatgtggttcgtgg

SEQ ID NO: 13212 - DNA, 24 bp, Meleagrid herpesvirus 1
tcgagccgcagcccggcggtgtct

SEQ ID NO: 13213 - DNA, 20 bp, Homo sapiens
cgggctgcggctcggcggcg

SEQ ID NO: 13214 - DNA, 60 bp, Meleagrid herpesvirus 1
gaggaggccgtaaatatggcgctcgtggcctgcgaagccgtgtctccctacgaccgcttc

SEQ ID NO: 13215 - DNA, 24 bp, Meleagrid herpesvirus 1
cgtaaatatggcgctcgtggcctg

SEQ ID NO: 13216 - DNA, 24 bp, Meleagrid herpesvirus 1
agccgtgtctccctacgaccgctt

SEQ ID NO: 13217 - DNA, 18 bp, Homo sapiens
tgcctcctgcgattgctt

SEQ ID NO: 13218 - DNA, 19 bp, Homo sapiens
agctgtgtcccctaccccc

SEQ ID NO: 13219 - DNA, 71 bp, Meleagrid herpesvirus 1
gtgcgaagccgcttctccgggcgcgaggtgcccacctggcccgcctcgtcccggacctgcctgctctgcgc

SEQ ID NO: 13220 - DNA, 23 bp, Meleagrid herpesvirus 1
tcccggacctgcctgctctgcgc

SEQ ID NO: 13221 - DNA, 24 bp, Meleagrid herpesvirus 1
tctccgggcgcgaggtgcccacct

SEQ ID NO: 13222 - DNA, 22 bp, Homo sapiens
tcctgcaaaacggtgcccatct

SEQ ID NO: 13223 - DNA, 18 bp, Homo sapiens
tccccgggcctgctcacc

SEQ ID NO: 13224 - DNA, 22 bp, Homo sapiens
tctcgggcgtggggggactgcc

SEQ ID NO: 13225 - DNA, 22 bp, Homo sapiens
cccgggcgcgactctctcacct

SEQ ID NO: 13226 - DNA, 22 bp, Homo sapiens
tctccaggcgccccccccgcct

SEQ ID NO: 13227 - DNA, 21 bp, Homo sapiens
tctgggcccccgtgcccacct

SEQ ID NO: 13228 - DNA, 18 bp, Homo sapiens
tctctgggcgtgagctcc

SEQ ID NO: 13229 - DNA, 15 bp, Homo sapiens
tccgggcccgtgccc

SEQ ID NO: 13230 - DNA, 18 bp, Homo sapiens
tctcctggcgcgaggtac

SEQ ID NO: 13231 - DNA, 18 bp, Homo sapiens
tcctgggtgtggcccacc

SEQ ID NO: 13232 - DNA, 17 bp, Homo sapiens
tctgggcagcgcccacc

SEQ ID NO: 13233 - DNA, 21 bp, Homo sapiens
tctccggggccccgcccgcct

SEQ ID NO: 13234 - DNA, 66 bp, Murine adenovirus A
tgagtatagacccaatccttaaactgatttaaaaccccatcaagagggttctcttctaattcctca

SEQ ID NO: 13235 - DNA, 24 bp, Murine adenovirus A
tatagacccaatccttaaactgat

SEQ ID NO: 13236 - DNA, 24 bp, Murine adenovirus A
aagagggttctcttctaattcctc

SEQ ID NO: 13237 - DNA, 18 bp, Homo sapiens
catagacccaatttttaa

SEQ ID NO: 13238 - DNA, 23 bp, Homo sapiens
aagagggtcttttccagtttctc

SEQ ID NO: 13239 - DNA, 19 bp, Homo sapiens
gggtaacccttaattcctc

SEQ ID NO: 13240 - DNA, 15 bp, Homo sapiens
gaaggttttaattcc

SEQ ID NO: 13241 - DNA, 23 bp, Homo sapiens
aagaggattttccctggaaattc

SEQ ID NO: 13242 - DNA, 18 bp, Homo sapiens
agggttcttttcctgctc

SEQ ID NO: 13243 - DNA, 19 bp, Homo sapiens
aaggggctccctggtttct

SEQ ID NO: 13244 - DNA, 18 bp, Homo sapiens
aagagggctttttctctt

SEQ ID NO: 13245 - DNA, 18 bp, Homo sapiens
gagggttcttcaccttct

SEQ ID NO: 13246 - DNA, 19 bp, Homo sapiens
aagagggttgcttttttct

SEQ ID NO: 13247 - DNA, 23 bp, Homo sapiens
agagggtttttcatatgtaattc

SEQ ID NO: 13248 - DNA, 131 bp, Murine adenovirus A
ttagtagagttgggtaatgttatagctagtcttggaccgagttatgatcaattaaagttgcagcaaggattgaattatttggtaactaaccaaagacaagaatataaaccatcagtacctgacttgactaa

SEQ ID NO: 13249 - DNA, 24 bp, Murine adenovirus A
tgggtaatgttatagctagtcttg

SEQ ID NO: 13250 - DNA, 24 bp, Murine adenovirus A
attgaattatttggtaactaacca

SEQ ID NO: 13251 - DNA, 20 bp, Homo sapiens
attgatttatttgggaacta

SEQ ID NO: 13252 - DNA, 22 bp, Homo sapiens
attgcaattttttggttaacta

SEQ ID NO: 13253 - DNA, 22 bp, Homo sapiens
actgaattcacgtgactaacca

SEQ ID NO: 13254 - DNA, 65 bp, Murine adenovirus A
gcgaccgcacagcagggaattgtagcacaaaataatactgcgccaccaacctactgcgcatgcgc

SEQ ID NO: 13255 - DNA, 24 bp, Murine adenovirus A
ccgcacagcagggaattgtagcac

SEQ ID NO: 13256 - DNA, 24 bp, Murine adenovirus A
cgccaccaacctactgcgcatgcg

SEQ ID NO: 13257 - DNA, 17 bp, Homo sapiens
ccgtgtgcagggaatgt

SEQ ID NO: 13258 - DNA, 18 bp, Homo sapiens
gcacagcagggaggccac

SEQ ID NO: 13259 - DNA, 18 bp, Homo sapiens
gcacagcaattgtagcac

SEQ ID NO: 13260 - DNA, 19 bp, Homo sapiens
cctgcagcagggggatcgc

SEQ ID NO: 13261 - DNA, 21 bp, Homo sapiens
ccggcagcagggggaaggcac

SEQ ID NO: 13262 - DNA, 17 bp, Homo sapiens
acagcattcttgtagca

SEQ ID NO: 13263 - DNA, 22 bp, Homo sapiens
ccgcgcggcagggaaggggcgc

SEQ ID NO: 13264 - DNA, 17 bp, Homo sapiens
gcgcagcaggaagggca

SEQ ID NO: 13265 - DNA, 18 bp, Homo sapiens
cacacagcggggagtggc

SEQ ID NO: 13266 - DNA, 20 bp, Homo sapiens
cgcagcagggccgacagtgc

SEQ ID NO: 13267 - DNA, 20 bp, Homo sapiens
gcacagcagtgtgagggcac

SEQ ID NO: 13268 - DNA, 19 bp, Homo sapiens
acagcagggctgacagcac

SEQ ID NO: 13269 - DNA, 18 bp, Homo sapiens
gcatagcaggaaagtcgc

SEQ ID NO: 13270 - DNA, 18 bp, Homo sapiens
agcagggattacaggcac

SEQ ID NO: 13271 - DNA, 18 bp, Homo sapiens
cacagcacactgtggtgc

SEQ ID NO: 13272 - DNA, 22 bp, Homo sapiens
gctaccacacctggctgtaatg

SEQ ID NO: 13273 - DNA, 22 bp, Homo sapiens
cgccatcacctgcctgcgcatg

SEQ ID NO: 13274 - DNA, 17 bp, Homo sapiens
cgcccccttgcgcatgc

SEQ ID NO: 13275 - DNA, 22 bp, Homo sapiens
gccatttgctgaggcgcatgcg

SEQ ID NO: 13276 - DNA, 23 bp, Homo sapiens
cgcgaccacccgctgcgcatgcg

SEQ ID NO: 13277 - DNA, 22 bp, Homo sapiens
ccccaccaacctacttcctgcg

SEQ ID NO: 13278 - DNA, 108 bp, Odontoglossum ringspot virus
tctctgaatttattaatttatcagcctttgaaaaactactaccgtcagctttaacggctgtcaagtcggtacgtattccaaaggttgataaaattataagttacgaga

SEQ ID NO: 13279 - DNA, 24 bp, Odontoglossum ringspot virus
tgtcaagtcggtacgtattccaaa

SEQ ID NO: 13280 - DNA, 24 bp, Odontoglossum ringspot virus
aaaactactaccgtcagctttaac

SEQ ID NO: 13281 - DNA, 17 bp, Homo sapiens
tgtcaagctctattcca

SEQ ID NO: 13282 - DNA, 19 bp, Homo sapiens
tgtcaattcggaattccaa

SEQ ID NO: 13283 - DNA, 16 bp, Homo sapiens
aacttctgtcagcttt

SEQ ID NO: 13284 - DNA, 18 bp, Homo sapiens
actatcataagctttaac

SEQ ID NO: 13285 - DNA, 20 bp, Homo sapiens
aaaactactgccttctcagc

SEQ ID NO: 13286 - DNA, 23 bp, Homo sapiens
aaaactactgccatctggggagc

SEQ ID NO: 13287 - DNA, 23 bp, Homo sapiens
aaaactactcatttcactttaac

SEQ ID NO: 13288 - DNA, 92 bp, Odontoglossum ringspot virus
gtgagtatctgtcttgtagacaaacgcatgaaaagagctaatgaagcaacacttggctcttatcatacatctgcttgcaagaagagattcac

SEQ ID NO: 13289 - DNA, 24 bp, Odontoglossum ringspot virus
tgtcttgtagacaaacgcatgaaa

SEQ ID NO: 13290 - DNA, 24 bp, Odontoglossum ringspot virus
tatcatacatctgcttgcaagaag

SEQ ID NO: 13291 - DNA, 22 bp, Homo sapiens
tgtcttgtagtgcagttcagga

SEQ ID NO: 13292 - DNA, 21 bp, Homo sapiens
tgtcttgtggacaacgcagtg

SEQ ID NO: 13293 - DNA, 19 bp, Homo sapiens
tatctacatctgtaaagaa

SEQ ID NO: 13294 - DNA, 16 bp, Homo sapiens
tgacatgcatgcaaga

SEQ ID NO: 13295 - DNA, 17 bp, Homo sapiens
catacatctcctgggga

SEQ ID NO: 13296 - DNA, 23 bp, Homo sapiens
tatcatatactcacaacaggaag

SEQ ID NO: 13297 - DNA, 22 bp, Homo sapiens
tatcacacagcattgtaggaag

SEQ ID NO: 13298 - DNA, 75 bp, Molluscum contagiosum virus
gtcgacgacgaagatgcagtggttgtgcgcggttaacggagttccgcctacttttacttcaatctttgcgtcggc

SEQ ID NO: 13299 - DNA, 24 bp, Molluscum contagiosum virus
acgaagatgcagtggttgtgcgcg

SEQ ID NO: 13300 - DNA, 24 bp, Molluscum contagiosum virus
ttttacttcaatctttgcgtcggc

SEQ ID NO: 13301 - DNA, 19 bp, Homo sapiens
gaggatgcagtgagccgtg

SEQ ID NO: 13302 - DNA, 19 bp, Homo sapiens
acggggtgcagtggaagtg

SEQ ID NO: 13303 - DNA, 20 bp, Homo sapiens
cgaggatgcagtggggcgcg

SEQ ID NO: 13304 - DNA, 20 bp, Homo sapiens
cgcgggtgcgagtgtgtgcg

SEQ ID NO: 13305 - DNA, 23 bp, Homo sapiens
cggagagcggggtcgcgtgcgcg

SEQ ID NO: 13306 - DNA, 21 bp, Homo sapiens
cgggatgcggctctgtgcgcg

SEQ ID NO: 13307 - DNA, 17 bp, Homo sapiens
cggggacgtgggtgcgc

SEQ ID NO: 13308 - DNA, 17 bp, Homo sapiens
gaggagcagtggcagtg

SEQ ID NO: 13309 - DNA, 21 bp, Homo sapiens
tttcacttcagtcaccttggc

SEQ ID NO: 13310 - DNA, 22 bp, Homo sapiens
ttttattttgatctttgctcgg

SEQ ID NO: 13311 - DNA, 22 bp, Homo sapiens
ttttactcaatttttacactgg

SEQ ID NO: 13312 - DNA, 63 bp, Molluscum contagiosum virus
gcgcagcagctgctcgcgcagagacagtgtttgcggcgcgggcgcgggcggcagagcgcgcgc

SEQ ID NO: 13313 - DNA, 24 bp, Molluscum contagiosum virus
cagcagctgctcgcgcagagacag

SEQ ID NO: 13314 - DNA, 24 bp, Molluscum contagiosum virus
cgggcgcgggcggcagagcgcgcg

SEQ ID NO: 13315 - DNA, 25 bp, Homo sapiens
cagcagctcgtggtatcggggacag

SEQ ID NO: 13316 - DNA, 21 bp, Homo sapiens
acagttgtgtgctagagacag

SEQ ID NO: 13317 - DNA, 16 bp, Homo sapiens
cagtgctgccagagac

SEQ ID NO: 13318 - DNA, 22 bp, Homo sapiens
cagcagctgccaaataagacag

SEQ ID NO: 13319 - DNA, 23 bp, Homo sapiens
cagcagctgctttctggggacag

SEQ ID NO: 13320 - DNA, 18 bp, Homo sapiens
caggggctgctcagacag

SEQ ID NO: 13321 - DNA, 19 bp, Homo sapiens
gcggccgctcgcgatctag

SEQ ID NO: 13322 - DNA, 24 bp, Homo sapiens
cagcagctatttaaaataagacag

SEQ ID NO: 13323 - DNA, 19 bp, Homo sapiens
cagcagctccgggtggaga

SEQ ID NO: 13324 - DNA, 19 bp, Homo sapiens
gcagctgctcacgacacag

SEQ ID NO: 13325 - DNA, 19 bp, Homo sapiens
acagctggggtccgcagag

SEQ ID NO: 13326 - DNA, 18 bp, Homo sapiens
cagcagccgctcgcgcag

SEQ ID NO: 13327 - DNA, 21 bp, Homo sapiens
cagcagctccttgctttacag

SEQ ID NO: 13328 - DNA, 19 bp, Homo sapiens
cagcagctggcaaggggag

SEQ ID NO: 13329 - DNA, 19 bp, Homo sapiens
gcgctggcgttagagacag

SEQ ID NO: 13330 - DNA, 14 bp, Homo sapiens
gctgctcaaggaca

SEQ ID NO: 13331 - DNA, 18 bp, Homo sapiens
caggagctgctcagacag

SEQ ID NO: 13332 - DNA, 17 bp, Homo sapiens
cagtggctgctcgccag

SEQ ID NO: 13333 - DNA, 19 bp, Homo sapiens
acagctgctctccaggcag

SEQ ID NO: 13334 - DNA, 18 bp, Homo sapiens
agtggccgcgcagagaca

SEQ ID NO: 13335 - DNA, 19 bp, Homo sapiens
gccgctgcagcagagacag

SEQ ID NO: 13336 - DNA, 16 bp, Homo sapiens
ggcgcgggcggcggcg

SEQ ID NO: 13337 - DNA, 22 bp, Homo sapiens
cgggcggcgggcggcgggcgcg

SEQ ID NO: 13338 - DNA, 24 bp, Homo sapiens
cgggcgcggggtgaccttcgcgcg

SEQ ID NO: 13339 - DNA, 22 bp, Homo sapiens
cgggcgcggagtggcgggagcg

SEQ ID NO: 13340 - DNA, 17 bp, Homo sapiens
cgggcgcggcggcggcg

SEQ ID NO: 13341 - DNA, 17 bp, Homo sapiens
cggggcgggcggcggcg

SEQ ID NO: 13342 - DNA, 17 bp, Homo sapiens
gggcgcgggctgcgcgc

SEQ ID NO: 13343 - DNA, 21 bp, Homo sapiens
cgggcggcgggcggcggggcg

SEQ ID NO: 13344 - DNA, 18 bp, Homo sapiens
gggcgcgggcggcgggcg

SEQ ID NO: 13345 - DNA, 21 bp, Homo sapiens
gggcgcgggcgctgccgggcg

SEQ ID NO: 13346 - DNA, 15 bp, Homo sapiens
gggcgcggcgacgcg

SEQ ID NO: 13347 - DNA, 20 bp, Homo sapiens
cgggcggcgggcggcctgcg

SEQ ID NO: 13348 - DNA, 17 bp, Homo sapiens
ggcgcgggcggcgggcg

SEQ ID NO: 13349 - DNA, 18 bp, Homo sapiens
gggcgcggtggtgggcac

SEQ ID NO: 13350 - DNA, 18 bp, Homo sapiens
cgggcgcgggagggcgcg

SEQ ID NO: 13351 - DNA, 22 bp, Homo sapiens
gagcgcaagggcggggcgcgcg

SEQ ID NO: 13352 - DNA, 18 bp, Homo sapiens
cgggcgcgggagccgcgc

SEQ ID NO: 13353 - DNA, 15 bp, Homo sapiens
gggcgcgggcgggcg

SEQ ID NO: 13354 - DNA, 25 bp, Homo sapiens
cgggcgctggcggcaggagaaagcg

SEQ ID NO: 13355 - DNA, 19 bp, Homo sapiens
gggtgcgggcgggctggcg

SEQ ID NO: 13356 - DNA, 21 bp, Homo sapiens
cgggcggagcgggggcgcgcg

SEQ ID NO: 13357 - DNA, 20 bp, Homo sapiens
ggtgcgggcggcggagagcg

SEQ ID NO: 13358 - DNA, 19 bp, Homo sapiens
gggcgcgggcggcggtgcg

SEQ ID NO: 13359 - DNA, 21 bp, Homo sapiens
caggtgcgggcggcaggtgcg

SEQ ID NO: 13360 - DNA, 23 bp, Homo sapiens
cgggagcgggacagcggcgcgcg

SEQ ID NO: 13361 - DNA, 19 bp, Homo sapiens
gcgagcggcggggcgcgcg

SEQ ID NO: 13362 - DNA, 21 bp, Homo sapiens
cggccgcggctggagagcgcg

SEQ ID NO: 13363 - DNA, 24 bp, Homo sapiens
cgggcgcaggcggctcccagcgcg

SEQ ID NO: 13364 - DNA, 18 bp, Homo sapiens
cgggctcgggcggcggcg

SEQ ID NO: 13365 - DNA, 18 bp, Homo sapiens
ggcgcgggcgggtgcgcg

SEQ ID NO: 13366 - DNA, 21 bp, Homo sapiens
cgggcgcgggggcagctcgcg

SEQ ID NO: 13367 - DNA, 16 bp, Homo sapiens
ggcgcgggcggtggcg

SEQ ID NO: 13368 - DNA, 19 bp, Homo sapiens
caggcgcgggcagtgcgcg

SEQ ID NO: 13369 - DNA, 24 bp, Homo sapiens
cgggcgcgaggctaacggcgcgcg

SEQ ID NO: 13370 - DNA, 22 bp, Homo sapiens
gggcgcaggcggggagcgcgcg

SEQ ID NO: 13371 - DNA, 17 bp, Homo sapiens
cgggcgcggcggctgcg

SEQ ID NO: 13372 - DNA, 17 bp, Homo sapiens
ggcgcgggcggtggccg

SEQ ID NO: 13373 - DNA, 17 bp, Homo sapiens
ggcgcgggcagcgcgcg

SEQ ID NO: 13374 - DNA, 19 bp, Homo sapiens
cgggcctgggcggcgggcg

SEQ ID NO: 13375 - DNA, 18 bp, Homo sapiens
cgggcgcgggcggccgcg

SEQ ID NO: 13376 - DNA, 17 bp, Homo sapiens
gggcgcggtggctcgcg

SEQ ID NO: 13377 - DNA, 23 bp, Homo sapiens
cgggcgcgcggcggctcctcgcg

SEQ ID NO: 13378 - DNA, 18 bp, Homo sapiens
cgggcggtgggcggcggc

SEQ ID NO: 13379 - DNA, 21 bp, Homo sapiens
cgggcggtgggcggcggctac

SEQ ID NO: 13380 - DNA, 19 bp, Homo sapiens
cgggcggtgggcggcggcg

SEQ ID NO: 13381 - DNA, 25 bp, Homo sapiens
cgggcggtgggcggcggcctccgcg

SEQ ID NO: 13382 - DNA, 19 bp, Homo sapiens
cggggcgggcggagcgcgc

SEQ ID NO: 13383 - DNA, 16 bp, Homo sapiens
gcgtcacggagcgcgc

SEQ ID NO: 13384 - DNA, 17 bp, Homo sapiens
ggctgcgggcggcggcg

SEQ ID NO: 13385 - DNA, 23 bp, Homo sapiens
cgggcggggcggaggggcgcgcg

SEQ ID NO: 13386 - DNA, 17 bp, Homo sapiens
cgggtggcgggcgggcg

SEQ ID NO: 13387 - DNA, 19 bp, Homo sapiens
cgcgcgcgggtggcgggcg

SEQ ID NO: 13388 - DNA, 21 bp, Homo sapiens
cgggcccgggcggcgggcacg

SEQ ID NO: 13389 - DNA, 18 bp, Homo sapiens
cgggtagcgagagcgcgc

SEQ ID NO: 13390 - DNA, 21 bp, Homo sapiens
cgggggcgggcggcgggaccg

SEQ ID NO: 13391 - DNA, 19 bp, Homo sapiens
cgggtgcgaggcggcggcg

SEQ ID NO: 13392 - DNA, 19 bp, Homo sapiens
cgcggcgcgggcggcggcg

SEQ ID NO: 13393 - DNA, 17 bp, Homo sapiens
gggtggtggagagcgcg

SEQ ID NO: 13394 - DNA, 17 bp, Homo sapiens
cgggccgggcggcggcg

SEQ ID NO: 13395 - DNA, 20 bp, Homo sapiens
cgggcggggcggtgtaggcg

SEQ ID NO: 13396 - DNA, 16 bp, Homo sapiens
cggggcggcgggcgcg

SEQ ID NO: 13397 - DNA, 19 bp, Homo sapiens
ggtgcaggcggggtgcgcg

SEQ ID NO: 13398 - DNA, 23 bp, Homo sapiens
gggcgcaggtcagtgggtgcgcg

SEQ ID NO: 13399 - DNA, 20 bp, Homo sapiens
cgggcgcggtggctcacgcg

SEQ ID NO: 13400 - DNA, 23 bp, Homo sapiens
cggggcgggcggagcgcggcgcg

SEQ ID NO: 13401 - DNA, 16 bp, Homo sapiens
ggcgtgggcggcggcg

SEQ ID NO: 13402 - DNA, 22 bp, Homo sapiens
gggtgtgggtggtgggagcgcg

SEQ ID NO: 13403 - DNA, 19 bp, Homo sapiens
cgggcgcgaggcggctgcg

SEQ ID NO: 13404 - DNA, 70 bp, Molluscum contagiosum virus
cagcggcacggcgttgttgatggtcttgggctggaacgagcggtccgtgatgtacagacacgtgctgttg

SEQ ID NO: 13405 - DNA, 20 bp, Molluscum contagiosum virus
tgtacagacacgtgctgttg

SEQ ID NO: 13406 - DNA, 24 bp, Molluscum contagiosum virus
ttgatggtcttgggctggaacgag

SEQ ID NO: 13407 - DNA, 20 bp, Homo sapiens
gtgcaggcattttgctgttg

SEQ ID NO: 13408 - DNA, 15 bp, Homo sapiens
tgtacaaatgctatt

SEQ ID NO: 13409 - DNA, 18 bp, Homo sapiens
tgcacagacatgctcctg

SEQ ID NO: 13410 - DNA, 21 bp, Homo sapiens
tgtgcagacacggtttatctg

SEQ ID NO: 13411 - DNA, 16 bp, Homo sapiens
cacaaatgtgctgttg

SEQ ID NO: 13412 - DNA, 19 bp, Homo sapiens
tgtagcatccctgctgttg

SEQ ID NO: 13413 - DNA, 17 bp, Homo sapiens
tgtacagggtgccactg

SEQ ID NO: 13414 - DNA, 14 bp, Homo sapiens
tgtacagtaccatt

SEQ ID NO: 13415 - DNA, 18 bp, Homo sapiens
tgtacagacacaaaattg

SEQ ID NO: 13416 - DNA, 21 bp, Homo sapiens
tgtacatgctggtatctgttg

SEQ ID NO: 13417 - DNA, 17 bp, Homo sapiens
tgacagatatgccactg

SEQ ID NO: 13418 - DNA, 17 bp, Homo sapiens
tacagacacgcccactg

SEQ ID NO: 13419 - DNA, 20 bp, Homo sapiens
tgtaggtactgctgctgttg

SEQ ID NO: 13420 - DNA, 19 bp, Homo sapiens
tgcactgagtgtgctgttg

SEQ ID NO: 13421 - DNA, 17 bp, Homo sapiens
tgcacagatgtgtcatt

SEQ ID NO: 13422 - DNA, 17 bp, Homo sapiens
tgacagactcactgttg

SEQ ID NO: 13423 - DNA, 20 bp, Homo sapiens
tgtaaagaactttgctgttg

SEQ ID NO: 13424 - DNA, 22 bp, Homo sapiens
tgtacaaaaatacctgctgttg

SEQ ID NO: 13425 - DNA, 18 bp, Homo sapiens
tgtcagacacgttatatt

SEQ ID NO: 13426 - DNA, 19 bp, Homo sapiens
tgtacaattggtgctgttg

SEQ ID NO: 13427 - DNA, 21 bp, Homo sapiens
tgtacagaccattaaatgttg

SEQ ID NO: 13428 - DNA, 19 bp, Homo sapiens
tgtacagacagtgacgatg

SEQ ID NO: 13429 - DNA, 15 bp, Homo sapiens
tgtacagatgctatt

SEQ ID NO: 13430 - DNA, 18 bp, Homo sapiens
gtgcagatgatgctgttg

SEQ ID NO: 13431 - DNA, 21 bp, Homo sapiens
tatacagacatcattgtgttg

SEQ ID NO: 13432 - DNA, 63 bp, African swine fever virus
tctgagggatggctcgtacaacaaaacacacatcgaggaatgtaatacctgtcctctctcaga

SEQ ID NO: 13433 - DNA, 21 bp, African swine fever virus
taatacctgtcctctctcaga

SEQ ID NO: 13434 - DNA, 24 bp, African swine fever virus
tgagggatggctcgtacaacaaaa

SEQ ID NO: 13435 - DNA, 18 bp, Homo sapiens
tggaggatggcagcagca

SEQ ID NO: 13436 - DNA, 20 bp, Homo sapiens
tgaaggatggcaattaacaa

SEQ ID NO: 13437 - DNA, 19 bp, Homo sapiens
tggggatggctcccggaca

SEQ ID NO: 13438 - DNA, 15 bp, Homo sapiens
agggatggacaacaa

SEQ ID NO: 13439 - DNA, 21 bp, Homo sapiens
tgaaggatgcaagaagtagca

SEQ ID NO: 13440 - DNA, 19 bp, Homo sapiens
gagggatggaattatgaca

SEQ ID NO: 13441 - DNA, 20 bp, Homo sapiens
tgagggtggacagtaacaaa

SEQ ID NO: 13442 - DNA, 22 bp, Homo sapiens
tgagggaaggggaacaacaaaa

SEQ ID NO: 13443 - DNA, 17 bp, Homo sapiens
tgagggatggtttcaac

SEQ ID NO: 13444 - DNA, 18 bp, Homo sapiens
tgaggatggctcagtcca

SEQ ID NO: 13445 - DNA, 20 bp, Homo sapiens
tgagtggtgagaatacaaca

SEQ ID NO: 13446 - DNA, 94 bp, African swine fever virus
atctccttaaaggaaataaatacctgggctacttaagagagttttatactcatacttaatataggccttagagtattccctattttaaggagat

SEQ ID NO: 13447 - DNA, 24 bp, African swine fever virus
tcatacttaatataggccttagag

SEQ ID NO: 13448 - DNA, 24 bp, African swine fever virus
taaatacctgggctacttaagaga

SEQ ID NO: 13449 - DNA, 24 bp, Homo sapiens
taaaaaccaaacctgcttaagaga

SEQ ID NO: 13450 - DNA, 23 bp, Homo sapiens
caaatacaacattgcttaagaga

SEQ ID NO: 13451 - DNA, 14 bp, Homo sapiens
acctgggcacagag

SEQ ID NO: 13452 - DNA, 23 bp, Homo sapiens
taactaaccaattacttaagaga

SEQ ID NO: 13453 - DNA, 17 bp, Homo sapiens
cacctgggccaccggag

SEQ ID NO: 13454 - DNA, 24 bp, Homo sapiens
taaaaataagacttacttaagaga

SEQ ID NO: 13455 - DNA, 61 bp, African swine fever virus
aatgaagtagatcaacactatttggaatatattctataattagtatatgatacatagcatt

SEQ ID NO: 13456 - DNA, 24 bp, African swine fever virus
aagtagatcaacactatttggaat

SEQ ID NO: 13457 - DNA, 22 bp, African swine fever virus
ttagtatatgatacatagcatt

SEQ ID NO: 13458 - DNA, 21 bp, Homo sapiens
agaagatcagcattttagaat

SEQ ID NO: 13459 - DNA, 20 bp, Homo sapiens
aagtagattaacattaagga

SEQ ID NO: 13460 - DNA, 15 bp, Homo sapiens
gcagatcagtctgga

SEQ ID NO: 13461 - DNA, 17 bp, Homo sapiens
aagtgatcaacacaggg

SEQ ID NO: 13462 - DNA, 18 bp, Homo sapiens
ttagtatatggaacatgc

SEQ ID NO: 13463 - DNA, 19 bp, Homo sapiens
tataaaccaacatagcatt

SEQ ID NO: 13464 - DNA, 18 bp, Homo sapiens
gtatatttacatagcatt

SEQ ID NO: 13465 - DNA, 67 bp, Human herpesvirus 6
gtgtacaaatgtatatgtaaacacaacaggaaaatatacatgtcccaaggcgtatacattctaacac

SEQ ID NO: 13466 - DNA, 24 bp, Human herpesvirus 6
tcccaaggcgtatacattctaaca

SEQ ID NO: 13467 - DNA, 24 bp, Human herpesvirus 6
tatatgtaaacacaacaggaaaat

SEQ ID NO: 13468 - DNA, 18 bp, Homo sapiens
caaggcataggactaaca

SEQ ID NO: 13469 - DNA, 16 bp, Homo sapiens
ccccaaaagctacatt

SEQ ID NO: 13470 - DNA, 24 bp, Homo sapiens
caaggcatatacaaaagtctgaca

SEQ ID NO: 13471 - DNA, 20 bp, Homo sapiens
tcccaagatgtgtacagctc

SEQ ID NO: 13472 - DNA, 18 bp, Homo sapiens
tcccaaggcctggactct

SEQ ID NO: 13473 - DNA, 14 bp, Homo sapiens
aaggcaattctaac

SEQ ID NO: 13474 - DNA, 21 bp, Homo sapiens
tcctgaggctgctttctaaca

SEQ ID NO: 13475 - DNA, 19 bp, Homo sapiens
tcccaaggtcatatgcatt

SEQ ID NO: 13476 - DNA, 99 bp, Human herpesvirus 8
aaatacattttctctccgaggtgaggtattatgtacgtgccgggaatggttcaggcaaaacatagttaccaatgacttcgccaagggttcgttgtgttt

SEQ ID NO: 13477 - DNA, 24 bp, Human herpesvirus 8
aggcaaaacatagttaccaatgac

SEQ ID NO: 13478 - DNA, 24 bp, Human herpesvirus 8
aggtattatgtacgtgccgggaat

SEQ ID NO: 13479 - DNA, 23 bp, Homo sapiens
gcaaaacaggcagggctgatgac

SEQ ID NO: 13480 - DNA, 20 bp, Homo sapiens
aggtaatacatagcccaata

SEQ ID NO: 13481 - DNA, 22 bp, Homo sapiens
agacaaaacacagctcagtgac

SEQ ID NO: 13482 - DNA, 19 bp, Homo sapiens
aggcaaagctagtgaatga

SEQ ID NO: 13483 - DNA, 21 bp, Homo sapiens
aggcagatcgtctccaatgac

SEQ ID NO: 13484 - DNA, 23 bp, Homo sapiens
aggcaagagcaaacaccaatgac

SEQ ID NO: 13485 - DNA, 18 bp, Homo sapiens
ggcaaaactggcacatga

SEQ ID NO: 13486 - DNA, 18 bp, Homo sapiens
agtattatgtatgtgtag

SEQ ID NO: 13487 - DNA, 106 bp, Human herpesvirus 8
ggatgtcgggggtttgaaaatataggaacatcgagactcaattttccagtatcccaagggagggggtagatggtgtctgtttcaaggtcgggctcaccgaatagcc

SEQ ID NO: 13488 - DNA, 24 bp, Human herpesvirus 8
actcaattttccagtatcccaagg

SEQ ID NO: 13489 - DNA, 24 bp, Human herpesvirus 8
tttcaaggtcgggctcaccgaata

SEQ ID NO: 13490 - DNA, 25 bp, Homo sapiens
ctcagttttccagcatagctgcagg

SEQ ID NO: 13491 - DNA, 20 bp, Homo sapiens
ccaattttcctcttccaagg

SEQ ID NO: 13492 - DNA, 23 bp, Homo sapiens
ctcagtttcccaaatgggcaagg

SEQ ID NO: 13493 - DNA, 21 bp, Homo sapiens
ccaattttattactcccaagg

SEQ ID NO: 13494 - DNA, 24 bp, Homo sapiens
tcaatttttcaataccttttaagg

SEQ ID NO: 13495 - DNA, 25 bp, Homo sapiens
tcaatttctcatcgatttcccaagg

SEQ ID NO: 13496 - DNA, 24 bp, Homo sapiens
actgcagtttcatccatcccaagg

SEQ ID NO: 13497 - DNA, 22 bp, Homo sapiens
ctcagtttccagccagccaggg

SEQ ID NO: 13498 - DNA, 22 bp, Homo sapiens
tcaattttctctcgtcctcagg

SEQ ID NO: 13499 - DNA, 23 bp, Homo sapiens
cttaactttcctacaatccaggg

SEQ ID NO: 13500 - DNA, 70 bp, Human herpesvirus 8
gccggcgctttctatctcaccgtagaatgcttcgtccacgattacgggcgtgacaattagaagtaccggt

SEQ ID NO: 13501 - DNA, 24 bp, Human herpesvirus 8
tctcaccgtagaatgcttcgtcca

SEQ ID NO: 13502 - DNA, 22 bp, Human herpesvirus 8
cgtgacaattagaagtaccggt

SEQ ID NO: 13503 - DNA, 21 bp, Homo sapiens
gttacggttagaagtaatggt

SEQ ID NO: 13504 - DNA, 16 bp, Homo sapiens
cgtgacaattgaagac

SEQ ID NO: 13505 - DNA, 20 bp, Homo sapiens
atgctcttagaagtactggt

SEQ ID NO: 13506 - DNA, 17 bp, Homo sapiens
gtggtaactagaaggcc

SEQ ID NO: 13507 - DNA, 65 bp, Meleagrid herpesvirus 1
catttttcacaccggaatcgagtaaaacataatatgcaaaaaatagttcgggtattgatataatg

SEQ ID NO: 13508 - DNA, 24 bp, Meleagrid herpesvirus 1
caccggaatcgagtaaaacataat

SEQ ID NO: 13509 - DNA, 19 bp, Meleagrid herpesvirus 1
ttcgggtattgatataatg

SEQ ID NO: 13510 - DNA, 21 bp, Homo sapiens
cacttggaattaaaacataat

SEQ ID NO: 13511 - DNA, 20 bp, Homo sapiens
ggaaagtaataaaacataat

SEQ ID NO: 13512 - DNA, 15 bp, Homo sapiens
ggagagaaaacataa

SEQ ID NO: 13513 - DNA, 16 bp, Homo sapiens
ggaatcaaaagacata

SEQ ID NO: 13514 - DNA, 68 bp, Paramecium bursaria Chlorella virus 1
cgcaatcgaacatttgtagcatttcatattctcgtagaataatgtgtctggcatgcaatgttgattcg

SEQ ID NO: 13515 - DNA, 24 bp, Paramecium bursaria Chlorella virus 1
tcgaacatttgtagcatttcatat

SEQ ID NO: 13516 - DNA, 20 bp, Paramecium bursaria Chlorella virus 1
tggcatgcaatgttgattcg

SEQ ID NO: 13517 - DNA, 17 bp, Homo sapiens
tcagacatttgtacact

SEQ ID NO: 13518 - DNA, 21 bp, Homo sapiens
tcaacatttctataatttcat

SEQ ID NO: 13519 - DNA, 15 bp, Homo sapiens
tggcatgcggtcttc

SEQ ID NO: 13520 - DNA, 17 bp, Homo sapiens
tggcatcaaccaagatt

SEQ ID NO: 13521 - DNA, 20 bp, Homo sapiens
tgggatgcccatttgattcg

SEQ ID NO: 13522 - DNA, 76 bp, Paramecium bursaria Chlorella virus 1
cgcgtatcggcgtcccggcgcggcgagcgtctgacggtctgtctctggcggtcccgcgtcgggtcgtggatccgtg

SEQ ID NO: 13523 - DNA, 24 bp, Paramecium bursaria Chlorella virus 1
tggcggtcccgcgtcgggtcgtgg

SEQ ID NO: 13524 - DNA, 24 bp, Paramecium bursaria Chlorella virus 1
tcccggcgcggcgagcgtctgacg

SEQ ID NO: 13525 - DNA, 16 bp, Homo sapiens
tggtggtccggtgtgt

SEQ ID NO: 13526 - DNA, 18 bp, Homo sapiens
tggcggctcgcgtcctgg

SEQ ID NO: 13527 - DNA, 23 bp, Homo sapiens
tggtgattcttatctggtcgtgg

SEQ ID NO: 13528 - DNA, 22 bp, Homo sapiens
ccccggcgcggcgggcgagacg

SEQ ID NO: 13529 - DNA, 18 bp, Homo sapiens
tcccggcacggggctctg

SEQ ID NO: 13530 - DNA, 19 bp, Homo sapiens
tcccggcatggcgagcctc

SEQ ID NO: 13531 - DNA, 21 bp, Homo sapiens
cccggcgcggcctccctggcg

SEQ ID NO: 13532 - DNA, 21 bp, Homo sapiens
tcccggcgcagcggcccggcg

SEQ ID NO: 13533 - DNA, 16 bp, Homo sapiens
cggcgcggccactctg

SEQ ID NO: 13534 - DNA, 21 bp, Homo sapiens
tcccagcgcggcgaggctgcg

SEQ ID NO: 13535 - DNA, 17 bp, Homo sapiens
cccggcgcggtgggctc

SEQ ID NO: 13536 - DNA, 19 bp, Homo sapiens
tcccggcgcggcgccccga

SEQ ID NO: 13537 - DNA, 19 bp, Homo sapiens
tcccggcgctgtgggtgcg

SEQ ID NO: 13538 - DNA, 19 bp, Homo sapiens
ccccggcgcggcgacggcg

SEQ ID NO: 13539 - DNA, 61 bp, Paramecium bursaria Chlorella virus 1
atcgtttgtgtatagtggtaggagcatagacgcttcgttttcaatattgataccaagcggt

SEQ ID NO: 13540 - DNA, 24 bp, Paramecium bursaria Chlorella virus 1
tgtatagtggtaggagcatagacg

SEQ ID NO: 13541 - DNA, 24 bp, Paramecium bursaria Chlorella virus 1
ttcgttttcaatattgataccaag

SEQ ID NO: 13542 - DNA, 22 bp, Homo sapiens
ttcgtttattaattacaccaag

SEQ ID NO: 13543 - DNA, 67 bp, Amsacta moorei entomopoxvirus
ataatattgaacatattttattgtatatattttaaaaatagctttataagatatgtgaaagttttat

SEQ ID NO: 13544 - DNA, 24 bp, Amsacta moorei entomopoxvirus
tattttattgtatatattttaaaa

SEQ ID NO: 13545 - DNA, 21 bp, Amsacta moorei entomopoxvirus
taagatatgtgaaagttttat

SEQ ID NO: 13546 - DNA, 18 bp, Homo sapiens
tattgtacatattttaaa

SEQ ID NO: 13547 - DNA, 17 bp, Homo sapiens
gatatacaaagttttat

SEQ ID NO: 13548 - DNA, 19 bp, Homo sapiens
aatacatgaaaagttttat

SEQ ID NO: 13549 - DNA, 22 bp, Homo sapiens
taagacatgatgtgggttttat

SEQ ID NO: 13550 - DNA, 21 bp, Homo sapiens
aagatgttgccaaagttttat

SEQ ID NO: 13551 - DNA, 18 bp, Homo sapiens
aatatatgaatattttat

SEQ ID NO: 13552 - DNA, 101 bp, Bovine herpesvirus 1
ggtgtaataggtttaagacttctactaaaatatttaaaatttttatcatgtttatgtatttgtattctttctccatcgtacttaaactctacaattatacc

SEQ ID NO: 13553 - DNA, 24 bp, Bovine herpesvirus 1
taataggtttaagacttctactaa

SEQ ID NO: 13554 - DNA, 24 bp, Bovine herpesvirus 1
tttgtattctttctccatcgtact

SEQ ID NO: 13555 - DNA, 18 bp, Homo sapiens
taatagatttgactgcta

SEQ ID NO: 13556 - DNA, 18 bp, Homo sapiens
taataggcttatctgcta

SEQ ID NO: 13557 - DNA, 18 bp, Homo sapiens
tttgtattttctctccac

SEQ ID NO: 13558 - DNA, 18 bp, Homo sapiens
tttgtgttctttccacat

SEQ ID NO: 13559 - DNA, 18 bp, Homo sapiens
tctgtattctttcttctc

SEQ ID NO: 13560 - DNA, 18 bp, Homo sapiens
tttgtattctttcaccac

SEQ ID NO: 13561 - DNA, 67 bp, Bovine herpesvirus 1
ccagaacactttgtaacagtgcaccatttttcagattttgtatcgtagcatcccataagaaaactgg

SEQ ID NO: 13562 - DNA, 22 bp, Bovine herpesvirus 1
tagcatcccataagaaaactgg

SEQ ID NO: 13563 - DNA, 24 bp, Bovine herpesvirus 1
actttgtaacagtgcaccattttt

SEQ ID NO: 13564 - DNA, 24 bp, Homo sapiens
taacatcctgtaagttctccctgg

SEQ ID NO: 13565 - DNA, 20 bp, Homo sapiens
tagcacccccagaaggctgg

SEQ ID NO: 13566 - DNA, 20 bp, Homo sapiens
tagcctttcaccaaaactgg

SEQ ID NO: 13567 - DNA, 18 bp, Homo sapiens
catcataaagaaaactgg

SEQ ID NO: 13568 - DNA, 17 bp, Homo sapiens
gcatcccataaatctgg

SEQ ID NO: 13569 - DNA, 18 bp, Homo sapiens
gcagccacaagaaactgg

SEQ ID NO: 13570 - DNA, 17 bp, Homo sapiens
acatcccagcaaattgg

SEQ ID NO: 13571 - DNA, 18 bp, Homo sapiens
agcagaggagaaaactgg

SEQ ID NO: 13572 - DNA, 20 bp, Homo sapiens
cagctaggtaagaaaactgg

SEQ ID NO: 13573 - DNA, 20 bp, Homo sapiens
aacacacataagaaagttgg

SEQ ID NO: 13574 - DNA, 16 bp, Homo sapiens
cagtgtcccaaaactg

SEQ ID NO: 13575 - DNA, 19 bp, Homo sapiens
gcatcccaggagatgatgg

SEQ ID NO: 13576 - DNA, 17 bp, Homo sapiens
cagcattttaaaaactg

SEQ ID NO: 13577 - DNA, 18 bp, Homo sapiens
actttgtaatatgcatca

SEQ ID NO: 13578 - DNA, 70 bp, Bovine herpesvirus 1
tccaaagatcgttgtactacctgttctaaattattacataatttgaatattccataagcgtctttatgga

SEQ ID NO: 13579 - DNA, 24 bp, Bovine herpesvirus 1
gatcgttgtactacctgttctaaa

SEQ ID NO: 13580 - DNA, 24 bp, Bovine herpesvirus 1
tttgaatattccataagcgtcttt

SEQ ID NO: 13581 - DNA, 21 bp, Homo sapiens
tcttgtgagatctgttctaaa

SEQ ID NO: 13582 - DNA, 18 bp, Homo sapiens
gatcgttgctgtggttct

SEQ ID NO: 13583 - DNA, 19 bp, Homo sapiens
ttgtgagactgcctgttct

SEQ ID NO: 13584 - DNA, 88 bp, Gallid herpesvirus 2
caccgtcgagcagtccgtcacccggtcgcggcgccgacgacggccgagtcgtcggagtctctcgccgacggggtcgtctgagacggtg

SEQ ID NO: 13585 - DNA, 24 bp, Gallid herpesvirus 2
gagcagtccgtcacccggtcgcgg

SEQ ID NO: 13586 - DNA, 23 bp, Gallid herpesvirus 2
cgacggggtcgtctgagacggtg

SEQ ID NO: 13587 - DNA, 28 bp, Homo sapiens
gagcagtccatttttgtggccgcgaccg

SEQ ID NO: 13588 - DNA, 19 bp, Homo sapiens
gagctgtttattggtcgcg

SEQ ID NO: 13589 - DNA, 19 bp, Homo sapiens
gcggttgtcacagccgcgg

SEQ ID NO: 13590 - DNA, 17 bp, Homo sapiens
gagcggtctgatcgcgg

SEQ ID NO: 13591 - DNA, 18 bp, Homo sapiens
gagcagtcgtcgctcgca

SEQ ID NO: 13592 - DNA, 19 bp, Homo sapiens
cgggggcagcgaggcggtg

SEQ ID NO: 13593 - DNA, 23 bp, Homo sapiens
gatggggtgaggctggggcggtg

SEQ ID NO: 13594 - DNA, 16 bp, Homo sapiens
ggggtcgctgccgctg

SEQ ID NO: 13595 - DNA, 108 bp, Gallid herpesvirus 2
cccggtgcctggcctctttctctgtgattcacccaacgcccttgacggacctccatactcgttgtctctaccggtgaggctttcatctatttcgagaccgggcacggg

SEQ ID NO: 13596 - DNA, 24 bp, Gallid herpesvirus 2
tgtgattcacccaacgcccttgac

SEQ ID NO: 13597 - DNA, 24 bp, Gallid herpesvirus 2
taccggtgaggctttcatctattt

SEQ ID NO: 13598 - DNA, 16 bp, Homo sapiens
tgtaattcataccctt

SEQ ID NO: 13599 - DNA, 17 bp, Homo sapiens
gtgattcacccgtcttg

SEQ ID NO: 13600 - DNA, 22 bp, Homo sapiens
tgtgattcaacctgatatatga

SEQ ID NO: 13601 - DNA, 18 bp, Homo sapiens
tgtgatccacccgccttg

SEQ ID NO: 13602 - DNA, 18 bp, Homo sapiens
tgtgatccgcctgccttg

SEQ ID NO: 13603 - DNA, 23 bp, Homo sapiens
tgtgattcgtcctgcctgctgac

SEQ ID NO: 13604 - DNA, 19 bp, Homo sapiens
tgtatcacagtgcccttga

SEQ ID NO: 13605 - DNA, 21 bp, Homo sapiens
tgtgattcaccagcaggagac

SEQ ID NO: 13606 - DNA, 24 bp, Homo sapiens
cggtgaggtggaaggcatttattt

SEQ ID NO: 13607 - DNA, 24 bp, Homo sapiens
ggcttttgaggcttttatttattt

SEQ ID NO: 13608 - DNA, 69 bp, Human herpesvirus 7
gtcgccgctgccgtctcttcagcctcgtcctcctcctcctcgctgaccaggggcttggcacgcgcgcgc

SEQ ID NO: 13609 - DNA, 24 bp, Human herpesvirus 7
tgaccaggggcttggcacgcgcgc

SEQ ID NO: 13610 - DNA, 24 bp, Human herpesvirus 7
ccgctgccgtctcttcagcctcgt

SEQ ID NO: 13611 - DNA, 21 bp, Homo sapiens
aggctggcggggcgcgcgcgc

SEQ ID NO: 13612 - DNA, 20 bp, Homo sapiens
tgaccaggggctttgcaaac

SEQ ID NO: 13613 - DNA, 18 bp, Homo sapiens
ccggggctgcacgcgcgc

SEQ ID NO: 13614 - DNA, 20 bp, Homo sapiens
accaggggtttcagacgtgc

SEQ ID NO: 13615 - DNA, 21 bp, Homo sapiens
tggccgtgggcttggctcagc

SEQ ID NO: 13616 - DNA, 20 bp, Homo sapiens
tggccaggggcctgcggtgc

SEQ ID NO: 13617 - DNA, 20 bp, Homo sapiens
tgggcaggggcttggtgagc

SEQ ID NO: 13618 - DNA, 22 bp, Homo sapiens
gcaaagcacttttcagccttgt

SEQ ID NO: 13619 - DNA, 17 bp, Homo sapiens
ctgcgccccagcctcgt

SEQ ID NO: 13620 - DNA, 25 bp, Homo sapiens
ccgctgcccgggccatcggcctcgt

SEQ ID NO: 13621 - DNA, 19 bp, Homo sapiens
ccgctgccgtctctctggc

SEQ ID NO: 13622 - DNA, 16 bp, Homo sapiens
gccgccgtctgcctcg

SEQ ID NO: 13623 - DNA, 19 bp, Homo sapiens
ccgctgtctctgcgcctcg

SEQ ID NO: 13624 - DNA, 61 bp, Human herpesvirus 7
tccgggggtagcaggccttctggaaagccttgagctgctcgaaggcctgctgcgccttgga

SEQ ID NO: 13625 - DNA, 24 bp, Human herpesvirus 7
tagcaggccttctggaaagccttg

SEQ ID NO: 13626 - DNA, 24 bp, Human herpesvirus 7
tgctcgaaggcctgctgcgccttg

SEQ ID NO: 13627 - DNA, 18 bp, Homo sapiens
tagtgggcttctggaaaa

SEQ ID NO: 13628 - DNA, 22 bp, Homo sapiens
aggttcgctctgggaagccttg

SEQ ID NO: 13629 - DNA, 22 bp, Homo sapiens
aggttcgctctggaaagccttg

SEQ ID NO: 13630 - DNA, 18 bp, Homo sapiens
ggcccacagaaagccttg

SEQ ID NO: 13631 - DNA, 17 bp, Homo sapiens
gcaggccccaaggcctt

SEQ ID NO: 13632 - DNA, 17 bp, Homo sapiens
ggtccgttgaagccttg

SEQ ID NO: 13633 - DNA, 21 bp, Homo sapiens
cagtgggccttctggaaggcc

SEQ ID NO: 13634 - DNA, 65 bp, Human herpesvirus 1
aatactgatgttgcttttcttggaaataaactattggtttttaatactagcattgcatcattatt

SEQ ID NO: 13635 - DNA, 24 bp, Human herpesvirus 1
tgatgttgcttttcttggaaataa

SEQ ID NO: 13636 - DNA, 18 bp, Human herpesvirus 1
tagcattgcatcattatt

SEQ ID NO: 13637 - DNA, 18 bp, Homo sapiens
tgctgttgcttttagaga

SEQ ID NO: 13638 - DNA, 20 bp, Homo sapiens
tgatgttgtttttcccagaa

SEQ ID NO: 13639 - DNA, 18 bp, Homo sapiens
tgatgttattttgaggaa

SEQ ID NO: 13640 - DNA, 17 bp, Homo sapiens
tgatttgctttcggtgg

SEQ ID NO: 13641 - DNA, 23 bp, Homo sapiens
taatgaattttttttggaaataa

SEQ ID NO: 13642 - DNA, 16 bp, Homo sapiens
gatgtgtcttggaaat

SEQ ID NO: 13643 - DNA, 19 bp, Homo sapiens
atgttgcttttctttttgg

SEQ ID NO: 13644 - DNA, 18 bp, Homo sapiens
gatctcttttttcttgga

SEQ ID NO: 13645 - DNA, 18 bp, Homo sapiens
tgtgttgctgttggaaat

SEQ ID NO: 13646 - DNA, 16 bp, Homo sapiens
gatgttgcttggggaa

SEQ ID NO: 13647 - DNA, 18 bp, Homo sapiens
tgatgttgtttgttcttg

SEQ ID NO: 13648 - DNA, 127 bp, Human herpesvirus 1
aattaaatttgtaaatatatttaatggtggtctttgttgttgattattttcaattggttctttaaaatatttttcaacattttgatttaaaattaaatttttcttatcatatatttcattattaatt

SEQ ID NO: 13649 - DNA, 24 bp, Human herpesvirus 1
tatttaatggtggtctttgttgtt

SEQ ID NO: 13650 - DNA, 24 bp, Human herpesvirus 1
tttttcaacattttgatttaaaat

SEQ ID NO: 13651 - DNA, 18 bp, Homo sapiens
tagtagtgttttgttgtt

SEQ ID NO: 13652 - DNA, 65 bp, Equine herpesvirus 2
gaaagaaatgtatcgttagaccacactttgagttcgggtgtggtcgtccgtaggcagagtctttt

SEQ ID NO: 13653 - DNA, 24 bp, Equine herpesvirus 2
tgtggtcgtccgtaggcagagtct

SEQ ID NO: 13654 - DNA, 24 bp, Equine herpesvirus 2
aatgtatcgttagaccacactttg

SEQ ID NO: 13655 - DNA, 19 bp, Homo sapiens
gtggggatgggcagagtct

SEQ ID NO: 13656 - DNA, 17 bp, Homo sapiens
tggggtccaggcagagt

SEQ ID NO: 13657 - DNA, 24 bp, Homo sapiens
tgtagtcgtcatgctgtagagtct

SEQ ID NO: 13658 - DNA, 63 bp, Equine herpesvirus 2
ggctgggtggaccccttggcgaacacgtgaggccccgcggcgcactgccacaggtccaccgcc

SEQ ID NO: 13659 - DNA, 24 bp, Equine herpesvirus 2
accccttggcgaacacgtgaggcc

SEQ ID NO: 13660 - DNA, 18 bp, Equine herpesvirus 2
tgccacaggtccaccgcc

SEQ ID NO: 13661 - DNA, 18 bp, Homo sapiens
ctgtgaaatacgtgaggc

SEQ ID NO: 13662 - DNA, 18 bp, Homo sapiens
accctctgggtgtgaggc

SEQ ID NO: 13663 - DNA, 18 bp, Homo sapiens
ccccttggtgattgtgaa

SEQ ID NO: 13664 - DNA, 19 bp, Homo sapiens
ttggcgaagcacctaggcc

SEQ ID NO: 13665 - DNA, 16 bp, Homo sapiens
ccttggcaacatgaag

SEQ ID NO: 13666 - DNA, 24 bp, Homo sapiens
cctgcgccgcgggtgcgtgaggcc

SEQ ID NO: 13667 - DNA, 19 bp, Homo sapiens
accccttggtgaccagcgc

SEQ ID NO: 13668 - DNA, 18 bp, Homo sapiens
ccctggcgggtggggggc

SEQ ID NO: 13669 - DNA, 15 bp, Homo sapiens
cctcctggcgagtgg

SEQ ID NO: 13670 - DNA, 19 bp, Homo sapiens
ccatggtgaacacgaaacc

SEQ ID NO: 13671 - DNA, 17 bp, Homo sapiens
ccccttggggcagaggc

SEQ ID NO: 13672 - DNA, 18 bp, Homo sapiens
ttggctacatgaggggcc

SEQ ID NO: 13673 - DNA, 18 bp, Homo sapiens
ccccttgggggccagagg

SEQ ID NO: 13674 - DNA, 21 bp, Homo sapiens
cctctaggagcgtgtgaggcc

SEQ ID NO: 13675 - DNA, 15 bp, Homo sapiens
cccctcggcgggagg

SEQ ID NO: 13676 - DNA, 17 bp, Homo sapiens
ccccttgggagcagacc

SEQ ID NO: 13677 - DNA, 17 bp, Homo sapiens
cccctcggcgggtgggg

SEQ ID NO: 13678 - DNA, 18 bp, Homo sapiens
ccccttggtggagcagac

SEQ ID NO: 13679 - DNA, 21 bp, Homo sapiens
accccttgagtgtgtgtgggg

SEQ ID NO: 13680 - DNA, 17 bp, Homo sapiens
cctcttagcgagtggag

SEQ ID NO: 13681 - DNA, 21 bp, Homo sapiens
ccccttaccccatgtggggcc

SEQ ID NO: 13682 - DNA, 17 bp, Homo sapiens
ccccctggcggtggggc

SEQ ID NO: 13683 - DNA, 19 bp, Homo sapiens
accccttggggtgaggggc

SEQ ID NO: 13684 - DNA, 19 bp, Homo sapiens
ccctggtgaacagataggg

SEQ ID NO: 13685 - DNA, 15 bp, Homo sapiens
ccttggtgatgaggc

SEQ ID NO: 13686 - DNA, 17 bp, Homo sapiens
accccttgcggacaagg

SEQ ID NO: 13687 - DNA, 17 bp, Homo sapiens
ttggcggggatgaggcc

SEQ ID NO: 13688 - DNA, 18 bp, Homo sapiens
gccgcaccggccaccgcc

SEQ ID NO: 13689 - DNA, 18 bp, Homo sapiens
tgctgcaggcccagaccg

SEQ ID NO: 13690 - DNA, 18 bp, Homo sapiens
gccgcagatgccaccgcc

SEQ ID NO: 13691 - DNA, 18 bp, Homo sapiens
tgtcagagccccaccgcc

SEQ ID NO: 13692 - DNA, 16 bp, Homo sapiens
taccactgccaccgcc

SEQ ID NO: 13693 - DNA, 18 bp, Homo sapiens
tgcccaccacccaccgcc

SEQ ID NO: 13694 - DNA, 19 bp, Homo sapiens
taccacagggacacacgcc

SEQ ID NO: 13695 - DNA, 20 bp, Homo sapiens
tgccacaggtcaaacatgcc

SEQ ID NO: 13696 - DNA, 18 bp, Homo sapiens
tgcacagacccagccgcc

SEQ ID NO: 13697 - DNA, 18 bp, Homo sapiens
tgcacggcctccaccgcc

SEQ ID NO: 13698 - DNA, 15 bp, Homo sapiens
tgcacaggccccgcc

SEQ ID NO: 13699 - DNA, 14 bp, Homo sapiens
cgcaatccaccgcc

SEQ ID NO: 13700 - DNA, 16 bp, Homo sapiens
tgccacagtccctgcc

SEQ ID NO: 13701 - DNA, 17 bp, Homo sapiens
tgtcacaaatccctgcc

SEQ ID NO: 13702 - DNA, 17 bp, Homo sapiens
tgacacaaaccattgcc

SEQ ID NO: 13703 - DNA, 18 bp, Homo sapiens
tgccatatggccaccgcc

SEQ ID NO: 13704 - DNA, 19 bp, Homo sapiens
tgacacaggtcacatttgc

SEQ ID NO: 13705 - DNA, 19 bp, Homo sapiens
tgccacaggccaggctgcc

SEQ ID NO: 13706 - DNA, 16 bp, Homo sapiens
tgccgaagccaccgcc

SEQ ID NO: 13707 - DNA, 19 bp, Homo sapiens
tgccacaggccagcatgcc

SEQ ID NO: 13708 - DNA, 23 bp, Homo sapiens
gccacaggtagatcccactgccg

SEQ ID NO: 13709 - DNA, 18 bp, Homo sapiens
gccgtgagccccaccgcc

SEQ ID NO: 13710 - DNA, 18 bp, Homo sapiens
gccacagcctacgccgcc

SEQ ID NO: 13711 - DNA, 18 bp, Homo sapiens
tgccacagccgcagccgc

SEQ ID NO: 13712 - DNA, 15 bp, Homo sapiens
tgccacagccccgcc

SEQ ID NO: 13713 - DNA, 16 bp, Homo sapiens
cgccgccaccaccgcc

SEQ ID NO: 13714 - DNA, 16 bp, Homo sapiens
cgccacagccaccgcc

SEQ ID NO: 13715 - DNA, 19 bp, Homo sapiens
tgccacagggcacgtggcc

SEQ ID NO: 13716 - DNA, 18 bp, Homo sapiens
gccgcggcccggaccgcc

SEQ ID NO: 13717 - DNA, 16 bp, Homo sapiens
cgccgtagccaccgcc

SEQ ID NO: 13718 - DNA, 19 bp, Homo sapiens
tgccacagtgaccactgcc

SEQ ID NO: 13719 - DNA, 18 bp, Homo sapiens
gccgctggtcccaccgcc

SEQ ID NO: 13720 - DNA, 17 bp, Homo sapiens
tgccacaagcgaacgcc

SEQ ID NO: 13721 - DNA, 20 bp, Homo sapiens
ccacaggtgcgagccaccgc

SEQ ID NO: 13722 - DNA, 87 bp, Equine herpesvirus 2
gatttcgtgctcgatttacctaaattgaatatacacgatacaatggtggtggtgggtaatcaaatcagacagttagaatacgtagtc

SEQ ID NO: 13723 - DNA, 24 bp, Equine herpesvirus 2
ttgaatatacacgatacaatggtg

SEQ ID NO: 13724 - DNA, 24 bp, Equine herpesvirus 2
gtggtgggtaatcaaatcagacag

SEQ ID NO: 13725 - DNA, 23 bp, Homo sapiens
ttgaatatacataattgttagtg

SEQ ID NO: 13726 - DNA, 15 bp, Homo sapiens
gtggtgggaatgaca

SEQ ID NO: 13727 - DNA, 18 bp, Homo sapiens
gtggtgggtggtcaccag

SEQ ID NO: 13728 - DNA, 17 bp, Homo sapiens
gtggtgggaattggatc

SEQ ID NO: 13729 - DNA, 18 bp, Homo sapiens
gtggtggggacacaggca

SEQ ID NO: 13730 - DNA, 115 bp, Equine herpesvirus 2
tctatctcaacacgttgatttacgtttagcagcggacaatcccgatctacgcgttggtctgcgttgggcagggatgtttgtgtactacggtgtttatcggtgtgttgttgataga

SEQ ID NO: 13731 - DNA, 24 bp, Equine herpesvirus 2
tagcagcggacaatcccgatctac

SEQ ID NO: 13732 - DNA, 24 bp, Equine herpesvirus 2
tactacggtgtttatcggtgtgtt

SEQ ID NO: 13733 - DNA, 18 bp, Homo sapiens
tagcagcgcacagtctga

SEQ ID NO: 13734 - DNA, 76 bp, Equine herpesvirus 2
tcattgtacaagaaacattgcatgaaagacgatgattattttaatcttatcttacctatgtttaattgtttaatga

SEQ ID NO: 13735 - DNA, 24 bp, Equine herpesvirus 2
tacaagaaacattgcatgaaagac

SEQ ID NO: 13736 - DNA, 24 bp, Equine herpesvirus 2
ttatcttacctatgtttaattgtt

SEQ ID NO: 13737 - DNA, 17 bp, Homo sapiens
aagaaaacatgaaggac

SEQ ID NO: 13738 - DNA, 22 bp, Homo sapiens
tacagcaaacaaatatgaaaga

SEQ ID NO: 13739 - DNA, 16 bp, Homo sapiens
cacaagaaactggaag

SEQ ID NO: 13740 - DNA, 18 bp, Homo sapiens
agaaacatgctggaaaga

SEQ ID NO: 13741 - DNA, 22 bp, Homo sapiens
tacgcagaatcttgtgaaagac

SEQ ID NO: 13742 - DNA, 18 bp, Homo sapiens
tacagaaacatctgaaga

SEQ ID NO: 13743 - DNA, 19 bp, Homo sapiens
aagaatcacagatgaaaga

SEQ ID NO: 13744 - DNA, 21 bp, Homo sapiens
tacaagaacaatgcagaagga

SEQ ID NO: 13745 - DNA, 14 bp, Homo sapiens
gaaacactgaaaga

SEQ ID NO: 13746 - DNA, 20 bp, Homo sapiens
caggagacattctgaaagac

SEQ ID NO: 13747 - DNA, 17 bp, Homo sapiens
tacaagaaattacaaga

SEQ ID NO: 13748 - DNA, 20 bp, Homo sapiens
tacaagaaacacccagaaag

SEQ ID NO: 13749 - DNA, 21 bp, Homo sapiens
tctggcttatgtttaattgtt

SEQ ID NO: 13750 - DNA, 80 bp, Human herpesvirus 2
ggcccggcgctccacgccggggttcccggcggcggaaaagcgcgaccgccgccgggtcttgtcgcggccgggcccgggcc

SEQ ID NO: 13751 - DNA, 24 bp, Human herpesvirus 2
cgccgggtcttgtcgcggccgggc

SEQ ID NO: 13752 - DNA, 24 bp, Human herpesvirus 2
acgccggggttcccggcggcggaa

SEQ ID NO: 13753 - DNA, 15 bp, Homo sapiens
ccgggacgcggccgg

SEQ ID NO: 13754 - DNA, 17 bp, Homo sapiens
cgccgggtgcggtcggg

SEQ ID NO: 13755 - DNA, 21 bp, Homo sapiens
gctggatcttgggtgctgggc

SEQ ID NO: 13756 - DNA, 15 bp, Homo sapiens
cgggtgtgggccggg

SEQ ID NO: 13757 - DNA, 17 bp, Homo sapiens
cgctgggtgtggccggg

SEQ ID NO: 13758 - DNA, 18 bp, Homo sapiens
cggcggggcgcggccggg

SEQ ID NO: 13759 - DNA, 16 bp, Homo sapiens
cgccgggctgggctgg

SEQ ID NO: 13760 - DNA, 20 bp, Homo sapiens
ccgggtccggacggccgggc

SEQ ID NO: 13761 - DNA, 20 bp, Homo sapiens
cgccgggtcttctccccggg

SEQ ID NO: 13762 - DNA, 23 bp, Homo sapiens
gccggggtctagaccggccgggc

SEQ ID NO: 13763 - DNA, 22 bp, Homo sapiens
cgccggggccggacggccgggc

SEQ ID NO: 13764 - DNA, 16 bp, Homo sapiens
gggctccgcggccggg

SEQ ID NO: 13765 - DNA, 22 bp, Homo sapiens
gcgggtcagccagtggccgggc

SEQ ID NO: 13766 - DNA, 20 bp, Homo sapiens
cgctgggtcttggttgcggc

SEQ ID NO: 13767 - DNA, 18 bp, Homo sapiens
cggggctcggggctgggc

SEQ ID NO: 13768 - DNA, 18 bp, Homo sapiens
cgccggcgcgcggccggg

SEQ ID NO: 13769 - DNA, 18 bp, Homo sapiens
cgctggatcacggctggg

SEQ ID NO: 13770 - DNA, 18 bp, Homo sapiens
cgtcggggcccggccggg

SEQ ID NO: 13771 - DNA, 17 bp, Homo sapiens
gccggggttggggtgga

SEQ ID NO: 13772 - DNA, 17 bp, Homo sapiens
acgtcggggtggggtgg

SEQ ID NO: 13773 - DNA, 16 bp, Homo sapiens
gccggggctgcggcgg

SEQ ID NO: 13774 - DNA, 15 bp, Homo sapiens
cggcggcggcggcgg

SEQ ID NO: 13775 - DNA, 14 bp, Homo sapiens
ccgggaggcggcgg

SEQ ID NO: 13776 - DNA, 15 bp, Homo sapiens
cgctggaggcggcgg

SEQ ID NO: 13777 - DNA, 24 bp, Homo sapiens
ccggggtttgcccagggcggtgga

SEQ ID NO: 13778 - DNA, 21 bp, Homo sapiens
gccgggcggcggcggcggcgg

SEQ ID NO: 13779 - DNA, 18 bp, Homo sapiens
caccgggaccggcggcgg

SEQ ID NO: 13780 - DNA, 20 bp, Homo sapiens
acgctggggtccccgtggag

SEQ ID NO: 13781 - DNA, 18 bp, Homo sapiens
cggcggcggcggcggcgg

SEQ ID NO: 13782 - DNA, 19 bp, Homo sapiens
cggcggcggcggcggcgga

SEQ ID NO: 13783 - DNA, 19 bp, Homo sapiens
ccgggggacccggcggtgg

SEQ ID NO: 13784 - DNA, 20 bp, Homo sapiens
cgctggggtccctgctaggg

SEQ ID NO: 13785 - DNA, 17 bp, Homo sapiens
acgccggggtcccaggg

SEQ ID NO: 13786 - DNA, 19 bp, Homo sapiens
cggcggcggcggcggtgga

SEQ ID NO: 13787 - DNA, 16 bp, Homo sapiens
gccggggcggcggcgg

SEQ ID NO: 13788 - DNA, 20 bp, Homo sapiens
gcgcggggcctggcggcgga

SEQ ID NO: 13789 - DNA, 23 bp, Homo sapiens
acaccggggcccgaggtggtgga

SEQ ID NO: 13790 - DNA, 19 bp, Homo sapiens
cgctaggggtgggcggcgg

SEQ ID NO: 13791 - DNA, 14 bp, Homo sapiens
cgccgcggcggcgg

SEQ ID NO: 13792 - DNA, 18 bp, Homo sapiens
cgacggggacggcggcgg

SEQ ID NO: 13793 - DNA, 18 bp, Homo sapiens
cggcggcagcggcggcgg

SEQ ID NO: 13794 - DNA, 15 bp, Homo sapiens
gcgcggcggcggcgg

SEQ ID NO: 13795 - DNA, 26 bp, Homo sapiens
cgccggggctgccgggtggcggcgga

SEQ ID NO: 13796 - DNA, 17 bp, Homo sapiens
cgctggagcggcggcgg

SEQ ID NO: 13797 - DNA, 20 bp, Homo sapiens
gctggggaaggggcggcgga

SEQ ID NO: 13798 - DNA, 15 bp, Homo sapiens
gggggccgcggcgga

SEQ ID NO: 13799 - DNA, 19 bp, Homo sapiens
actcggggtcgggcggcgg

SEQ ID NO: 13800 - DNA, 20 bp, Homo sapiens
cggcggctgggcggcggcgg

SEQ ID NO: 13801 - DNA, 22 bp, Homo sapiens
gctcgggctcgggcggcggcgg

SEQ ID NO: 13802 - DNA, 15 bp, Homo sapiens
cgacggcggcggcgg

SEQ ID NO: 13803 - DNA, 21 bp, Homo sapiens
gctggggttcccccttggtgg

SEQ ID NO: 13804 - DNA, 18 bp, Homo sapiens
gccgggattgaggtgggg

SEQ ID NO: 13805 - DNA, 19 bp, Homo sapiens
cggtgacgctcggcggcgg

SEQ ID NO: 13806 - DNA, 20 bp, Homo sapiens
ccggggttttcgcgcttgga

SEQ ID NO: 13807 - DNA, 18 bp, Homo sapiens
cgccgggttcggcggcgg

SEQ ID NO: 13808 - DNA, 16 bp, Homo sapiens
gccggggggcggcgga

SEQ ID NO: 13809 - DNA, 19 bp, Homo sapiens
cccaagccctggtggcgga

SEQ ID NO: 13810 - DNA, 19 bp, Homo sapiens
gcccggccccggcggcgga

SEQ ID NO: 13811 - DNA, 14 bp, Homo sapiens
gccggcggcggcgg

SEQ ID NO: 13812 - DNA, 19 bp, Homo sapiens
cgctgggatttctggctgg

SEQ ID NO: 13813 - DNA, 17 bp, Homo sapiens
gccgggactggcggcgg

SEQ ID NO: 13814 - DNA, 21 bp, Homo sapiens
gccagggttccccctctggga

SEQ ID NO: 13815 - DNA, 18 bp, Homo sapiens
cgccgaatccggcggcgg

SEQ ID NO: 13816 - DNA, 18 bp, Homo sapiens
gggcttctcggcggcgga

SEQ ID NO: 13817 - DNA, 16 bp, Homo sapiens
gcgcgggcggcggcgg

SEQ ID NO: 13818 - DNA, 16 bp, Homo sapiens
acggcgggggtggcgg

SEQ ID NO: 13819 - DNA, 18 bp, Homo sapiens
gccggcgggcggcggcgg

SEQ ID NO: 13820 - DNA, 17 bp, Homo sapiens
cgccgggggtggtgggg

SEQ ID NO: 13821 - DNA, 17 bp, Homo sapiens
gcccggaccggcggcgg

SEQ ID NO: 13822 - DNA, 16 bp, Homo sapiens
gccgggggcggcgggg

SEQ ID NO: 13823 - DNA, 16 bp, Homo sapiens
ccgggggagcggtgga

SEQ ID NO: 13824 - DNA, 17 bp, Homo sapiens
ccgcaagtcggcggcgg

SEQ ID NO: 13825 - DNA, 21 bp, Homo sapiens
gcctggggagcgggcggcgga

SEQ ID NO: 13826 - DNA, 18 bp, Homo sapiens
cgccggggtccgagccgg

SEQ ID NO: 13827 - DNA, 19 bp, Homo sapiens
gctgggggcggggcggcgg

SEQ ID NO: 13828 - DNA, 20 bp, Homo sapiens
gcgcggggcgcaggcggcgg

SEQ ID NO: 13829 - DNA, 17 bp, Homo sapiens
cgctgcggcggcggcgg

SEQ ID NO: 13830 - DNA, 20 bp, Homo sapiens
gctggggctcccctacacgg

SEQ ID NO: 13831 - DNA, 17 bp, Homo sapiens
cgccgcggcggcggcgg

SEQ ID NO: 13832 - DNA, 20 bp, Homo sapiens
cccgggcgggcggcggcgga

SEQ ID NO: 13833 - DNA, 88 bp, Gallid herpesvirus 3
cagtttctgaagcaaaagcaaaagaggctatagggataatgctgcaattgcaatctctacagaagtctgagtatgcttcggagaactg

SEQ ID NO: 13834 - DNA, 24 bp, Gallid herpesvirus 3
acagaagtctgagtatgcttcgga

SEQ ID NO: 13835 - DNA, 24 bp, Gallid herpesvirus 3
tctgaagcaaaagcaaaagaggct

SEQ ID NO: 13836 - DNA, 18 bp, Homo sapiens
cagagggctgagtatcgg

SEQ ID NO: 13837 - DNA, 18 bp, Homo sapiens
cagaagtttggcctttgg

SEQ ID NO: 13838 - DNA, 22 bp, Homo sapiens
acaaggtctgagcacttttggg

SEQ ID NO: 13839 - DNA, 18 bp, Homo sapiens
cagcagtctgagtgcggg

SEQ ID NO: 13840 - DNA, 22 bp, Homo sapiens
acagaagctgggcatgattggg

SEQ ID NO: 13841 - DNA, 24 bp, Homo sapiens
acagaagtctttaaggtgtttcgg

SEQ ID NO: 13842 - DNA, 22 bp, Homo sapiens
aaagtctgggtgaaggcctggg

SEQ ID NO: 13843 - DNA, 20 bp, Homo sapiens
agaagtcttacatgtttgga

SEQ ID NO: 13844 - DNA, 23 bp, Homo sapiens
gaagtctgagaaacaagtttgga

SEQ ID NO: 13845 - DNA, 20 bp, Homo sapiens
tcggagcaaaagtgacagct

SEQ ID NO: 13846 - DNA, 22 bp, Homo sapiens
tcagaggctgttaaaagaggct

SEQ ID NO: 13847 - DNA, 24 bp, Homo sapiens
cctgaaagactagtaaaagaggct

SEQ ID NO: 13848 - DNA, 20 bp, Homo sapiens
ctgaagcagctcaaggggct

SEQ ID NO: 13849 - DNA, 22 bp, Homo sapiens
tctgaaacctagaagagaggct

SEQ ID NO: 13850 - DNA, 22 bp, Homo sapiens
tctgaagcagtgcggggaggct

SEQ ID NO: 13851 - DNA, 22 bp, Homo sapiens
tctgaaacaaaaccctgaggct

SEQ ID NO: 13852 - DNA, 21 bp, Homo sapiens
ctgaagcagggggctgaggct

SEQ ID NO: 13853 - DNA, 17 bp, Homo sapiens
tgaagcaaagcatcagc

SEQ ID NO: 13854 - DNA, 21 bp, Homo sapiens
tctgaagcaggggacaaagct

SEQ ID NO: 13855 - DNA, 17 bp, Homo sapiens
cgaggcaaaagcgaaga

SEQ ID NO: 13856 - DNA, 20 bp, Homo sapiens
tgaggtggaacaaagaggct

SEQ ID NO: 13857 - DNA, 21 bp, Homo sapiens
tctggaggcagagaagaggct

SEQ ID NO: 13858 - DNA, 18 bp, Homo sapiens
taaagcacaaaaaagagg

SEQ ID NO: 13859 - DNA, 14 bp, Homo sapiens
cctgaagcagaggc

SEQ ID NO: 13860 - DNA, 63 bp, Gallid herpesvirus 3
aagcgcgatacaaatcgacatctggttttcgagacccgcgtttcgtaccgcatgccggcgctt

SEQ ID NO: 13861 - DNA, 22 bp, Gallid herpesvirus 3
ttcgtaccgcatgccggcgctt

SEQ ID NO: 13862 - DNA, 24 bp, Gallid herpesvirus 3
tcgacatctggttttcgagacccg

SEQ ID NO: 13863 - DNA, 19 bp, Homo sapiens
acttcctgctcgagacccg

SEQ ID NO: 13864 - DNA, 61 bp, Gallid herpesvirus 3
ggggagaaaggggcggtagggggaagcgacgagaccgatcatcctccacctcccccacccc

SEQ ID NO: 13865 - DNA, 24 bp, Gallid herpesvirus 3
atcatcctccacctcccccacccc

SEQ ID NO: 13866 - DNA, 24 bp, Gallid herpesvirus 3
cggtagggggaagcgacgagaccg

SEQ ID NO: 13867 - DNA, 28 bp, Homo sapiens
atcagcctccaccttaactgcccacccc

SEQ ID NO: 13868 - DNA, 15 bp, Homo sapiens
tcctccactccaccc

SEQ ID NO: 13869 - DNA, 17 bp, Homo sapiens
tcctccacgcccgtccc

SEQ ID NO: 13870 - DNA, 25 bp, Homo sapiens
accatcctaagattttcccctgccc

SEQ ID NO: 13871 - DNA, 17 bp, Homo sapiens
atcatcctcgccacccc

SEQ ID NO: 13872 - DNA, 16 bp, Homo sapiens
tcctccctcccacccc

SEQ ID NO: 13873 - DNA, 21 bp, Homo sapiens
tcaggctgtctcccccattcc

SEQ ID NO: 13874 - DNA, 24 bp, Homo sapiens
accagtctctgcctcccccatccc

SEQ ID NO: 13875 - DNA, 25 bp, Homo sapiens
atcaccctaggttctcccctgtccc

SEQ ID NO: 13876 - DNA, 21 bp, Homo sapiens
catcctccgcctcccgcgccc

SEQ ID NO: 13877 - DNA, 18 bp, Homo sapiens
tcctgggacccccacccc

SEQ ID NO: 13878 - DNA, 19 bp, Homo sapiens
catccttccacctcactcc

SEQ ID NO: 13879 - DNA, 22 bp, Homo sapiens
accattttccacctccagctcc

SEQ ID NO: 13880 - DNA, 19 bp, Homo sapiens
accatcctccccatccacc

SEQ ID NO: 13881 - DNA, 22 bp, Homo sapiens
tcatcttccacccccgccgccc

SEQ ID NO: 13882 - DNA, 20 bp, Homo sapiens
tcccccactcacctctccca

SEQ ID NO: 13883 - DNA, 17 bp, Homo sapiens
tcttcccctcccacccc

SEQ ID NO: 13884 - DNA, 22 bp, Homo sapiens
atcatccttttacttctacccc

SEQ ID NO: 13885 - DNA, 18 bp, Homo sapiens
tcatcctctattcactcc

SEQ ID NO: 13886 - DNA, 19 bp, Homo sapiens
tcatcctcagccctgtccc

SEQ ID NO: 13887 - DNA, 22 bp, Homo sapiens
atcaccctgtgttccttacccc

SEQ ID NO: 13888 - DNA, 21 bp, Homo sapiens
tcaccctctgcacagtgtctc

SEQ ID NO: 13889 - DNA, 25 bp, Homo sapiens
ccatcttccaccccaaagccgttcc

SEQ ID NO: 13890 - DNA, 17 bp, Homo sapiens
tctcctccactcacccc

SEQ ID NO: 13891 - DNA, 17 bp, Homo sapiens
tcattcccacccgtccc

SEQ ID NO: 13892 - DNA, 18 bp, Homo sapiens
atcctcctctcccattcc

SEQ ID NO: 13893 - DNA, 21 bp, Homo sapiens
tcacctcccaaaggccccacc

SEQ ID NO: 13894 - DNA, 18 bp, Homo sapiens
ccccaccctcccctaccc

SEQ ID NO: 13895 - DNA, 23 bp, Homo sapiens
tcatcctctaccagttccactcc

SEQ ID NO: 13896 - DNA, 22 bp, Homo sapiens
tcgtccctgtggctcccacccc

SEQ ID NO: 13897 - DNA, 23 bp, Homo sapiens
tcatttgccccctcccccactcc

SEQ ID NO: 13898 - DNA, 21 bp, Homo sapiens
atcatcctcgtcccttgtcca

SEQ ID NO: 13899 - DNA, 20 bp, Homo sapiens
catccagacctcccctgccc

SEQ ID NO: 13900 - DNA, 18 bp, Homo sapiens
tcaccctccccttgctcc

SEQ ID NO: 13901 - DNA, 28 bp, Homo sapiens
atcatcctccctcctcagtctctgcccc

SEQ ID NO: 13902 - DNA, 21 bp, Homo sapiens
atcacccttccaccccattcc

SEQ ID NO: 13903 - DNA, 19 bp, Homo sapiens
atcatccccacttcttgcc

SEQ ID NO: 13904 - DNA, 21 bp, Homo sapiens
catgcctgccttccccacccc

SEQ ID NO: 13905 - DNA, 24 bp, Homo sapiens
accattaatactcttccccacccc

SEQ ID NO: 13906 - DNA, 15 bp, Homo sapiens
catccctcccccacc

SEQ ID NO: 13907 - DNA, 24 bp, Homo sapiens
atcatccttccatttcttgaatcc

SEQ ID NO: 13908 - DNA, 21 bp, Homo sapiens
cccggccccgcctcccccgcc

SEQ ID NO: 13909 - DNA, 18 bp, Homo sapiens
atcctccactcaggcccc

SEQ ID NO: 13910 - DNA, 21 bp, Homo sapiens
tcatcagccctcccccattcc

SEQ ID NO: 13911 - DNA, 19 bp, Homo sapiens
ccatcctcctcgctcgccc

SEQ ID NO: 13912 - DNA, 19 bp, Homo sapiens
accatccttgcctctgccc

SEQ ID NO: 13913 - DNA, 22 bp, Homo sapiens
tcatcctctgtctgtccattcc

SEQ ID NO: 13914 - DNA, 19 bp, Homo sapiens
tcatcctcacttctgttcc

SEQ ID NO: 13915 - DNA, 21 bp, Homo sapiens
accatccctttcctctatccc

SEQ ID NO: 13916 - DNA, 20 bp, Homo sapiens
catcctccaggatccattcc

SEQ ID NO: 13917 - DNA, 19 bp, Homo sapiens
tcacatccacctcccctac

SEQ ID NO: 13918 - DNA, 19 bp, Homo sapiens
atcatcctctacacttctc

SEQ ID NO: 13919 - DNA, 20 bp, Homo sapiens
catgccacctcctttgcccc

SEQ ID NO: 13920 - DNA, 23 bp, Homo sapiens
atcctttccctctcccccacccc

SEQ ID NO: 13921 - DNA, 18 bp, Homo sapiens
tcaccctctgcctttcac

SEQ ID NO: 13922 - DNA, 16 bp, Homo sapiens
ctccccttcccacccc

SEQ ID NO: 13923 - DNA, 17 bp, Homo sapiens
ggtaagagcgatgggac

SEQ ID NO: 13924 - DNA, 20 bp, Homo sapiens
cggcaggactgcggtgggac

SEQ ID NO: 13925 - DNA, 19 bp, Homo sapiens
ggcagggggagaaacaaga

SEQ ID NO: 13926 - DNA, 17 bp, Homo sapiens
cggtgcggggaagctcg

SEQ ID NO: 13927 - DNA, 22 bp, Homo sapiens
cggtaggggagggctggaaaga

SEQ ID NO: 13928 - DNA, 17 bp, Homo sapiens
gtggggggaagagagac

SEQ ID NO: 13929 - DNA, 25 bp, Homo sapiens
ggtaggggaaagggggttgcggtcc

SEQ ID NO: 13930 - DNA, 17 bp, Homo sapiens
ggcagggggaggacgag

SEQ ID NO: 13931 - DNA, 63 bp, Gallid herpesvirus 3
tggctggagatagcactgagcgtctaggcaggcccagaatgctcattagctttacttcaacta

SEQ ID NO: 13932 - DNA, 24 bp, Gallid herpesvirus 3
tagcactgagcgtctaggcaggcc

SEQ ID NO: 13933 - DNA, 24 bp, Gallid herpesvirus 3
cagaatgctcattagctttacttc

SEQ ID NO: 13934 - DNA, 21 bp, Homo sapiens
gcattgtagaagtaggcaggc

SEQ ID NO: 13935 - DNA, 19 bp, Homo sapiens
cactggggctacaggcagg

SEQ ID NO: 13936 - DNA, 16 bp, Homo sapiens
gctctgggtggcaggc

SEQ ID NO: 13937 - DNA, 19 bp, Homo sapiens
gcgctgagccgggcaggcc

SEQ ID NO: 13938 - DNA, 20 bp, Homo sapiens
acattgaggctgggcaggcc

SEQ ID NO: 13939 - DNA, 20 bp, Homo sapiens
gcgttgaacgtctcctggcc

SEQ ID NO: 13940 - DNA, 21 bp, Homo sapiens
acactgagactcaggcaggcc

SEQ ID NO: 13941 - DNA, 19 bp, Homo sapiens
ctgagcgtctaggaagacc

SEQ ID NO: 13942 - DNA, 21 bp, Homo sapiens
gcactgagtggggagcgggcc

SEQ ID NO: 13943 - DNA, 18 bp, Homo sapiens
gcctagagtttaggcagg

SEQ ID NO: 13944 - DNA, 21 bp, Homo sapiens
gcattgagcaggcctggcggg

SEQ ID NO: 13945 - DNA, 19 bp, Homo sapiens
cagaactgtcacagcttta

SEQ ID NO: 13946 - DNA, 21 bp, Homo sapiens
cagagtacttgcttttacttc

SEQ ID NO: 13947 - DNA, 20 bp, Homo sapiens
gaatgccctcccatttactt

SEQ ID NO: 13948 - DNA, 19 bp, Homo sapiens
caggatcctcatctgcttc

SEQ ID NO: 13949 - DNA, 18 bp, Homo sapiens
cagaatgccaattacttc

SEQ ID NO: 13950 - DNA, 21 bp, Homo sapiens
gaatgctctgttgaaagcttc

SEQ ID NO: 13951 - DNA, 18 bp, Homo sapiens
gagtgtctcattcacttc

SEQ ID NO: 13952 - DNA, 71 bp, Human papillomavirus type 83
ggatcaacatgtcactcaccagagcgtccacgtcctcgtggcagaactctctcggtaggaccacgggatcc

SEQ ID NO: 13953 - DNA, 24 bp, Human papillomavirus type 83
tctctcggtaggaccacgggatcc

SEQ ID NO: 13954 - DNA, 24 bp, Human papillomavirus type 83
tgtcactcaccagagcgtccacgt

SEQ ID NO: 13955 - DNA, 18 bp, Homo sapiens
tctccgatctgcgggatc

SEQ ID NO: 13956 - DNA, 22 bp, Homo sapiens
tctctcggtggtgcagtggttc

SEQ ID NO: 13957 - DNA, 18 bp, Homo sapiens
tctctcggggaaggggtc

SEQ ID NO: 13958 - DNA, 23 bp, Homo sapiens
tctctcgggagggcctctggttc

SEQ ID NO: 13959 - DNA, 22 bp, Homo sapiens
tgccactcactagctcgtgcgt

SEQ ID NO: 13960 - DNA, 18 bp, Homo sapiens
tgctgttcaccagagccc

SEQ ID NO: 13961 - DNA, 22 bp, Homo sapiens
tgtcactcagccccctccatgt

SEQ ID NO: 13962 - DNA, 19 bp, Homo sapiens
gtcactcactaggttacgt

SEQ ID NO: 13963 - DNA, 24 bp, Homo sapiens
tgtttctcaccagccgcgctgcgt

SEQ ID NO: 13964 - DNA, 66 bp, Human papillomavirus type 83
taattgttattggccgggacgaagtgggattactgcttattattttaattctcatcgtaattatta

SEQ ID NO: 13965 - DNA, 24 bp, Human papillomavirus type 83
ttgttattggccgggacgaagtgg

SEQ ID NO: 13966 - DNA, 24 bp, Human papillomavirus type 83
ttattattttaattctcatcgtaa

SEQ ID NO: 13967 - DNA, 15 bp, Homo sapiens
ttgttattggcagtg

SEQ ID NO: 13968 - DNA, 21 bp, Homo sapiens
ttgttattgaggatggggtgg

SEQ ID NO: 13969 - DNA, 19 bp, Homo sapiens
tcgttattggttgggcatg

SEQ ID NO: 13970 - DNA, 79 bp, Lucerne transient streak virus
cctgtgagattgtttgtaaagaatgagccccaccctgccaacaaggtgcgggaagggcgctttagactaatctcatcgg

SEQ ID NO: 13971 - DNA, 24 bp, Lucerne transient streak virus
gattgtttgtaaagaatgagcccc

SEQ ID NO: 13972 - DNA, 24 bp, Lucerne transient streak virus
tgcgggaagggcgctttagactaa

SEQ ID NO: 13973 - DNA, 18 bp, Homo sapiens
gattcctggggaatgagc

SEQ ID NO: 13974 - DNA, 17 bp, Homo sapiens
gattgtttgtgccaagc

SEQ ID NO: 13975 - DNA, 15 bp, Homo sapiens
ttgtttgcagtgagc

SEQ ID NO: 13976 - DNA, 20 bp, Homo sapiens
gcggggagggagcaaaggct

SEQ ID NO: 13977 - DNA, 21 bp, Homo sapiens
tgggggtgggtgctcatgcta

SEQ ID NO: 13978 - DNA, 24 bp, Homo sapiens
tgcgggaagggcaatcaagactaa

SEQ ID NO: 13979 - DNA, 20 bp, Homo sapiens
tgcgggaaagggtgctgtag

SEQ ID NO: 13980 - DNA, 18 bp, Homo sapiens
tggggaggggtgcacact

SEQ ID NO: 13981 - DNA, 18 bp, Homo sapiens
tgggggagggaagagact

SEQ ID NO: 13982 - DNA, 85 bp, Lucerne transient streak virus
tatttagatatctggaacaccctgacgactttgaggagttggcagtggaattgcagggttgtcagtggccgcggatatacaagta

SEQ ID NO: 13983 - DNA, 24 bp, Lucerne transient streak virus
tcagtggccgcggatatacaagta

SEQ ID NO: 13984 - DNA, 24 bp, Lucerne transient streak virus
tctggaacaccctgacgactttga

SEQ ID NO: 13985 - DNA, 16 bp, Homo sapiens
atggctttatacaagt

SEQ ID NO: 13986 - DNA, 16 bp, Homo sapiens
agtggttgacacaagt

SEQ ID NO: 13987 - DNA, 22 bp, Homo sapiens
tctggaactcctgacctcatga

SEQ ID NO: 13988 - DNA, 19 bp, Homo sapiens
tctggaactcttgacctca

SEQ ID NO: 13989 - DNA, 18 bp, Homo sapiens
tctgggacagcctgatga

SEQ ID NO: 13990 - DNA, 23 bp, Homo sapiens
tctggaactcctgggctaaatga

SEQ ID NO: 13991 - DNA, 20 bp, Homo sapiens
tctgggcaccctgacccttg

SEQ ID NO: 13992 - DNA, 19 bp, Homo sapiens
tctgggaaccttgactcct

SEQ ID NO: 13993 - DNA, 21 bp, Homo sapiens
tctggaacttctgacaatctg

SEQ ID NO: 13994 - DNA, 19 bp, Homo sapiens
tctggggagctggactttg

SEQ ID NO: 13995 - DNA, 21 bp, Homo sapiens
tggaacaccaaaaaattttga

SEQ ID NO: 13996 - DNA, 20 bp, Homo sapiens
tggaacacctggagctttga

SEQ ID NO: 13997 - DNA, 74 bp, Lucerne transient streak virus
gttgtaattggtacaacaaacatgtaatattgtattccacatgtaaatattattgtgtactatagttatacaac

SEQ ID NO: 13998 - DNA, 24 bp, Lucerne transient streak virus
tggtacaacaaacatgtaatattg

SEQ ID NO: 13999 - DNA, 24 bp, Lucerne transient streak virus
tattgtgtactatagttatacaac

SEQ ID NO: 14000 - DNA, 18 bp, Homo sapiens
tggtattgtaaacatgta

SEQ ID NO: 14001 - DNA, 18 bp, Homo sapiens
tattgtgctattgttaca

SEQ ID NO: 14002 - DNA, 19 bp, Homo sapiens
tattgtgtacttagctata

SEQ ID NO: 14003 - DNA, 21 bp, Homo sapiens
tattatgtactgtgctctaac

SEQ ID NO: 14004 - DNA, 65 bp, Amsacta moorei entomopoxvirus
aatgattcaggagttataaaatttatgggccaattttcaaatgtttgtaatctttcagattcatt

SEQ ID NO: 14005 - DNA, 24 bp, Amsacta moorei entomopoxvirus
aaatgtttgtaatctttcagattc

SEQ ID NO: 14006 - DNA, 24 bp, Amsacta moorei entomopoxvirus
ggagttataaaatttatgggccaa

SEQ ID NO: 14007 - DNA, 21 bp, Homo sapiens
gtttgatcctgtttcagattc

SEQ ID NO: 14008 - DNA, 16 bp, Homo sapiens
tgtctgtggtcagatt

SEQ ID NO: 14009 - DNA, 23 bp, Homo sapiens
aaatgtttgataaggtacagatt

SEQ ID NO: 14010 - DNA, 16 bp, Homo sapiens
acgtttctttcagatt

SEQ ID NO: 14011 - DNA, 19 bp, Homo sapiens
ggaattataagagaggggc

SEQ ID NO: 14012 - DNA, 17 bp, Homo sapiens
ggattataaaacttggc

SEQ ID NO: 14013 - DNA, 20 bp, Homo sapiens
gaagttatgaggcgcgggcc

SEQ ID NO: 14014 - DNA, 18 bp, Homo sapiens
ggtgttgaatttatgggc

SEQ ID NO: 14015 - DNA, 22 bp, Homo sapiens
gggtttgtagggacatgggcca

SEQ ID NO: 14016 - DNA, 24 bp, Homo sapiens
ggagttacgacagggatgggtcaa

SEQ ID NO: 14017 - DNA, 91 bp, Amsacta moorei entomopoxvirus
gacgatttgataaacgtggattgtgtcattactttttgaataaaatctttgccttttacaagtttaacataatcacatttatcaaaccatc

SEQ ID NO: 14018 - DNA, 24 bp, Amsacta moorei entomopoxvirus
tacaagtttaacataatcacattt

SEQ ID NO: 14019 - DNA, 24 bp, Amsacta moorei entomopoxvirus
acgtggattgtgtcattacttttt

SEQ ID NO: 14020 - DNA, 23 bp, Homo sapiens
caagtttaagtgtatacacattt

SEQ ID NO: 14021 - DNA, 18 bp, Homo sapiens
caagacatagtcacattt

SEQ ID NO: 14022 - DNA, 17 bp, Homo sapiens
acaagtttattcacatt

SEQ ID NO: 14023 - DNA, 23 bp, Homo sapiens
caagtttacagttaattacattt

SEQ ID NO: 14024 - DNA, 18 bp, Homo sapiens
gttaactataatcacatt

SEQ ID NO: 14025 - DNA, 18 bp, Homo sapiens
tacaggcttaacaacatt

SEQ ID NO: 14026 - DNA, 19 bp, Homo sapiens
gtataacataaagcacatt

SEQ ID NO: 14027 - DNA, 18 bp, Homo sapiens
acgtggatttgtaaaatt

SEQ ID NO: 14028 - DNA, 20 bp, Homo sapiens
gtgggtgtgtttgtcttttt

SEQ ID NO: 14029 - DNA, 111 bp, Bovine papillomavirus
gcacctaataaaaatcacttaatagcaatgtgctgtgtcagttgtttattggaaccacacccggtacacatcctgtccagcatttgcagtgcgtgcattgaattattgtgc

SEQ ID NO: 14030 - DNA, 24 bp, Bovine papillomavirus
tacacatcctgtccagcatttgca

SEQ ID NO: 14031 - DNA, 24 bp, Bovine papillomavirus
taatagcaatgtgctgtgtcagtt

SEQ ID NO: 14032 - DNA, 16 bp, Homo sapiens
tcctgtccagtttgca

SEQ ID NO: 14033 - DNA, 20 bp, Homo sapiens
acatcctgtctcccactgca

SEQ ID NO: 14034 - DNA, 15 bp, Homo sapiens
acacatccttatttg

SEQ ID NO: 14035 - DNA, 16 bp, Homo sapiens
acattctggcatttgc

SEQ ID NO: 14036 - DNA, 19 bp, Homo sapiens
acaatgtgtgtatatagtt

SEQ ID NO: 14037 - DNA, 18 bp, Homo sapiens
gcaattactgtgttggtt

SEQ ID NO: 14038 - DNA, 17 bp, Homo sapiens
taatagcaatgtttgtg

SEQ ID NO: 14039 - DNA, 61 bp, Bovine papillomavirus
ggctagacttcatggcgcctggcaccgaatcctgccttctcagcgaaaatgaataattgct

SEQ ID NO: 14040 - DNA, 22 bp, Bovine papillomavirus
tcagcgaaaatgaataattgct

SEQ ID NO: 14041 - DNA, 24 bp, Bovine papillomavirus
acttcatggcgcctggcaccgaat

SEQ ID NO: 14042 - DNA, 19 bp, Homo sapiens
ccagtgaaaatgaagtact

SEQ ID NO: 14043 - DNA, 19 bp, Homo sapiens
tcagcaaagtgatgacgct

SEQ ID NO: 14044 - DNA, 19 bp, Homo sapiens
tcagcgaaaatgctgtgct

SEQ ID NO: 14045 - DNA, 17 bp, Homo sapiens
agcaaaatgaatacagc

SEQ ID NO: 14046 - DNA, 16 bp, Homo sapiens
tcaggggaacaattgc

SEQ ID NO: 14047 - DNA, 19 bp, Homo sapiens
ctgcactgcctggcattga

SEQ ID NO: 14048 - DNA, 19 bp, Homo sapiens
acttcatgtgacttactga

SEQ ID NO: 14049 - DNA, 80 bp, Bovine papillomavirus
gtttccattgcgtctgggcttgtctatcattgcgtctctatggtttttggaggattagacggggccaccagtaatggtgc

SEQ ID NO: 14050 - DNA, 24 bp, Bovine papillomavirus
ggattagacggggccaccagtaat

SEQ ID NO: 14051 - DNA, 24 bp, Bovine papillomavirus
tccattgcgtctgggcttgtctat

SEQ ID NO: 14052 - DNA, 23 bp, Homo sapiens
ggattaaacgctaattcagtaat

SEQ ID NO: 14053 - DNA, 22 bp, Homo sapiens
ccatattattctgggcttgtct

SEQ ID NO: 14054 - DNA, 60 bp, Bovine papillomavirus
ccgccttaaactacagacaggtcccagccaagtaggcggatcaaaacctcaaaaaggcgg

SEQ ID NO: 14055 - DNA, 20 bp, Bovine papillomavirus
tcaaaacctcaaaaaggcgg

SEQ ID NO: 14056 - DNA, 24 bp, Bovine papillomavirus
ccttaaactacagacaggtcccag

SEQ ID NO: 14057 - DNA, 16 bp, Homo sapiens
aaagactcaaaggcgg

SEQ ID NO: 14058 - DNA, 22 bp, Homo sapiens
tcaaaaccctcaataccagtgg

SEQ ID NO: 14059 - DNA, 17 bp, Homo sapiens
ccaaaaccctgaggcgg

SEQ ID NO: 14060 - DNA, 19 bp, Homo sapiens
tcaagtcctcaaaaggtag

SEQ ID NO: 14061 - DNA, 18 bp, Homo sapiens
aaaacctcaaaatactgg

SEQ ID NO: 14062 - DNA, 15 bp, Homo sapiens
caaaacctcaagaca

SEQ ID NO: 14063 - DNA, 19 bp, Homo sapiens
caaaaatttgaaaaggcgg

SEQ ID NO: 14064 - DNA, 19 bp, Homo sapiens
tccaaacctcaaaaaaagg

SEQ ID NO: 14065 - DNA, 19 bp, Homo sapiens
tcaaaaccgtaaatcacgg

SEQ ID NO: 14066 - DNA, 18 bp, Homo sapiens
caaaaccttaaagactgg

SEQ ID NO: 14067 - DNA, 15 bp, Homo sapiens
aaaaccccagggcgg

SEQ ID NO: 14068 - DNA, 18 bp, Homo sapiens
caaaacctttcaaggtgg

SEQ ID NO: 14069 - DNA, 17 bp, Homo sapiens
cttggaaccaacaggtc

SEQ ID NO: 14070 - DNA, 16 bp, Homo sapiens
ctcaaactgcagggtc

SEQ ID NO: 14071 - DNA, 19 bp, Homo sapiens
ccttatgctacagacatcc

SEQ ID NO: 14072 - DNA, 22 bp, Homo sapiens
ctcaaagctgggcaggtcccag

SEQ ID NO: 14073 - DNA, 19 bp, Homo sapiens
ctcaagttacaggcagctc

SEQ ID NO: 14074 - DNA, 18 bp, Homo sapiens
cttaaactgccagttcag

SEQ ID NO: 14075 - DNA, 23 bp, Homo sapiens
ccttaaactacaatgaaccacag

SEQ ID NO: 14076 - DNA, 19 bp, Homo sapiens
cttaaactaaagagaggtc

SEQ ID NO: 14077 - DNA, 18 bp, Homo sapiens
ccttgggctagagcccca

SEQ ID NO: 14078 - DNA, 22 bp, Homo sapiens
ttaaactacaacataatcccag

SEQ ID NO: 14079 - DNA, 24 bp, Homo sapiens
ccctgaacatggagcgggtcccag

SEQ ID NO: 14080 - DNA, 21 bp, Homo sapiens
cctaggattccagggtcccag

SEQ ID NO: 14081 - DNA, 23 bp, Homo sapiens
ttaaactacagagggttttccag

SEQ ID NO: 14082 - DNA, 19 bp, Homo sapiens
ttaaacacctgagtcccag

SEQ ID NO: 14083 - DNA, 21 bp, Homo sapiens
ccttgagctcagcaatcccag

SEQ ID NO: 14084 - DNA, 23 bp, Homo sapiens
cttaaactcactatggcaggtcc

SEQ ID NO: 14085 - DNA, 68 bp, Bovine papillomavirus
ggagcagcagtggccgggggcccagacgggagtccgcgtcgccctggcgctcgtcgccgcctttgccc

SEQ ID NO: 14086 - DNA, 24 bp, Bovine papillomavirus
agtggccgggggcccagacgggag

SEQ ID NO: 14087 - DNA, 24 bp, Bovine papillomavirus
tcgccctggcgctcgtcgccgcct

SEQ ID NO: 14088 - DNA, 23 bp, Homo sapiens
agtggtttggggtccgacacgag

SEQ ID NO: 14089 - DNA, 17 bp, Homo sapiens
ggccggcctaggtggga

SEQ ID NO: 14090 - DNA, 16 bp, Homo sapiens
ggccgggggtcccggg

SEQ ID NO: 14091 - DNA, 17 bp, Homo sapiens
ggccgggggcggagggg

SEQ ID NO: 14092 - DNA, 19 bp, Homo sapiens
gcggccgggcgggggcggg

SEQ ID NO: 14093 - DNA, 19 bp, Homo sapiens
agggccgggggcccattgg

SEQ ID NO: 14094 - DNA, 22 bp, Homo sapiens
gtgaccgggggctcgccgccag

SEQ ID NO: 14095 - DNA, 15 bp, Homo sapiens
gtggcagggggcggg

SEQ ID NO: 14096 - DNA, 16 bp, Homo sapiens
agggcccccagatggg

SEQ ID NO: 14097 - DNA, 17 bp, Homo sapiens
tggtcgggggcctcgag

SEQ ID NO: 14098 - DNA, 17 bp, Homo sapiens
agggctggggatacggg

SEQ ID NO: 14099 - DNA, 20 bp, Homo sapiens
ggccgggggccgctggggag

SEQ ID NO: 14100 - DNA, 19 bp, Homo sapiens
gtggccgggccggggtggg

SEQ ID NO: 14101 - DNA, 22 bp, Homo sapiens
agtggccgaggggtcccagggg

SEQ ID NO: 14102 - DNA, 20 bp, Homo sapiens
aggggctgggtggaggtggg

SEQ ID NO: 14103 - DNA, 18 bp, Homo sapiens
ggctgggcgtgacgggag

SEQ ID NO: 14104 - DNA, 17 bp, Homo sapiens
ggccgggggccaggggg

SEQ ID NO: 14105 - DNA, 21 bp, Homo sapiens
gcggctggcctcggacgggag

SEQ ID NO: 14106 - DNA, 21 bp, Homo sapiens
aggggccgggggctgcgggag

SEQ ID NO: 14107 - DNA, 18 bp, Homo sapiens
agtggctggttggtggga

SEQ ID NO: 14108 - DNA, 16 bp, Homo sapiens
gcggccgggagacggg

SEQ ID NO: 14109 - DNA, 19 bp, Homo sapiens
ggctgggaggggatgggag

SEQ ID NO: 14110 - DNA, 22 bp, Homo sapiens
tggccgggaatgggggtgggag

SEQ ID NO: 14111 - DNA, 18 bp, Homo sapiens
agaggttgggggacggga

SEQ ID NO: 14112 - DNA, 19 bp, Homo sapiens
gcggccggggccggtgggg

SEQ ID NO: 14113 - DNA, 21 bp, Homo sapiens
gtgtctgggggccctatgggg

SEQ ID NO: 14114 - DNA, 24 bp, Homo sapiens
agtggctgggggctggttggtggg

SEQ ID NO: 14115 - DNA, 18 bp, Homo sapiens
agaggccgggggcgggga

SEQ ID NO: 14116 - DNA, 19 bp, Homo sapiens
agtggccgagtgtgatggg

SEQ ID NO: 14117 - DNA, 19 bp, Homo sapiens
agtggccaggggcctgcgg

SEQ ID NO: 14118 - DNA, 18 bp, Homo sapiens
agtggccaggggcttggg

SEQ ID NO: 14119 - DNA, 21 bp, Homo sapiens
gtggcggggcagggacgggag

SEQ ID NO: 14120 - DNA, 97 bp, Amsacta moorei entomopoxvirus
ttatatcattacttacaaatgtatatagaatatttagaaaataataaaattattaaaggctattggataactatgaaattaaaagataatgatataa

SEQ ID NO: 14121 - DNA, 24 bp, Amsacta moorei entomopoxvirus
tagaatatttagaaaataataaaa

SEQ ID NO: 14122 - DNA, 24 bp, Amsacta moorei entomopoxvirus
aaaggctattggataactatgaaa

SEQ ID NO: 14123 - DNA, 19 bp, Homo sapiens
gaactacagaaaataataa

SEQ ID NO: 14124 - DNA, 17 bp, Homo sapiens
aaggctttgactatgaa

SEQ ID NO: 14125 - DNA, 19 bp, Homo sapiens
aaagcctgaggactatgaa

SEQ ID NO: 14126 - DNA, 16 bp, Homo sapiens
ggctacttaactatga

SEQ ID NO: 14127 - DNA, 16 bp, Homo sapiens
aggctactggggatga

SEQ ID NO: 14128 - DNA, 19 bp, Homo sapiens
ggctattgataattatgaa

SEQ ID NO: 14129 - DNA, 21 bp, Homo sapiens
aaaggtttaaaaactatgaaa

SEQ ID NO: 14130 - DNA, 96 bp, Amsacta moorei entomopoxvirus
gcctttctccggcaggtagcctacacgtacctcactatggccataaagatgcagccatagagaggtacgtgaagaagacccgtcggaatcagaagc

SEQ ID NO: 14131 - DNA, 24 bp, Amsacta moorei entomopoxvirus
tacacgtacctcactatggccata

SEQ ID NO: 14132 - DNA, 24 bp, Amsacta moorei entomopoxvirus
tacgtgaagaagacccgtcggaat

SEQ ID NO: 14133 - DNA, 17 bp, Homo sapiens
catgcagtcactatggc

SEQ ID NO: 14134 - DNA, 19 bp, Homo sapiens
tacacgtatttcacattgc

SEQ ID NO: 14135 - DNA, 19 bp, Homo sapiens
tacaatatactatggccat

SEQ ID NO: 14136 - DNA, 19 bp, Homo sapiens
acgtaccttgtggtatggc

SEQ ID NO: 14137 - DNA, 19 bp, Homo sapiens
tacagtgtcccctggccat

SEQ ID NO: 14138 - DNA, 21 bp, Homo sapiens
atactgtagaatatggccata

SEQ ID NO: 14139 - DNA, 18 bp, Homo sapiens
cacgtgaaggaggtcaga

SEQ ID NO: 14140 - DNA, 19 bp, Homo sapiens
tgaagaagattgtaaaaat

SEQ ID NO: 14141 - DNA, 16 bp, Homo sapiens
tgaagaaggttcagaa

SEQ ID NO: 14142 - DNA, 19 bp, Homo sapiens
gtggagaagaccccaaaga

SEQ ID NO: 14143 - DNA, 74 bp, Human herpesvirus 7
attatcaccttaatctcttcaggcgaacataaataactccagctgtgtacattctgaggatcggggtagataat

SEQ ID NO: 14144 - DNA, 24 bp, Human herpesvirus 7
tacattctgaggatcggggtagat

SEQ ID NO: 14145 - DNA, 24 bp, Human herpesvirus 7
tatcaccttaatctcttcaggcga

SEQ ID NO: 14146 - DNA, 18 bp, Homo sapiens
ttctgagggtccctgggt

SEQ ID NO: 14147 - DNA, 27 bp, Homo sapiens
tacattctgcaggattttggtgtggat

SEQ ID NO: 14148 - DNA, 18 bp, Homo sapiens
cattttgtagggtggggt

SEQ ID NO: 14149 - DNA, 18 bp, Homo sapiens
taattctgaatagggtag

SEQ ID NO: 14150 - DNA, 16 bp, Homo sapiens
ttctggaaggggtaga

SEQ ID NO: 14151 - DNA, 17 bp, Homo sapiens
ttctgagactagggtag

SEQ ID NO: 14152 - DNA, 20 bp, Homo sapiens
tcacctctccctttaggtga

SEQ ID NO: 14153 - DNA, 21 bp, Homo sapiens
tatcacttgatgttcaggtga

SEQ ID NO: 14154 - DNA, 64 bp, Human herpesvirus 7
gggttaaggcctcggggttagggtctcaggcggcgtttggcttaggggcccggggttaggacct

SEQ ID NO: 14155 - DNA, 21 bp, Human herpesvirus 7
aggggcccggggttaggacct

SEQ ID NO: 14156 - DNA, 24 bp, Human herpesvirus 7
aaggcctcggggttagggtctcag

SEQ ID NO: 14157 - DNA, 19 bp, Homo sapiens
gaggcccaacccaggatct

SEQ ID NO: 14158 - DNA, 20 bp, Homo sapiens
agaggtcactccctggggtc

SEQ ID NO: 14159 - DNA, 20 bp, Homo sapiens
aggggcccgccgaagggcct

SEQ ID NO: 14160 - DNA, 18 bp, Homo sapiens
ggggctcggggtagacct

SEQ ID NO: 14161 - DNA, 19 bp, Homo sapiens
ggggcccggaggcgctcct

SEQ ID NO: 14162 - DNA, 18 bp, Homo sapiens
agggtctggggtcggcct

SEQ ID NO: 14163 - DNA, 20 bp, Homo sapiens
gggatccgggacccgggcct

SEQ ID NO: 14164 - DNA, 19 bp, Homo sapiens
aggggctgccccaggacct

SEQ ID NO: 14165 - DNA, 21 bp, Homo sapiens
aggagcccccagctggggcct

SEQ ID NO: 14166 - DNA, 20 bp, Homo sapiens
ggggcccggggaggcagcct

SEQ ID NO: 14167 - DNA, 17 bp, Homo sapiens
ggggctagggaagacct

SEQ ID NO: 14168 - DNA, 15 bp, Homo sapiens
aagggcccagggacc

SEQ ID NO: 14169 - DNA, 17 bp, Homo sapiens
gggacccgggggcccct

SEQ ID NO: 14170 - DNA, 19 bp, Homo sapiens
aggatggaggggttaggac

SEQ ID NO: 14171 - DNA, 22 bp, Homo sapiens
gggacccggcggtggggggcct

SEQ ID NO: 14172 - DNA, 17 bp, Homo sapiens
agggcgcctgggctgac

SEQ ID NO: 14173 - DNA, 22 bp, Homo sapiens
aggggccggggccgctgggcct

SEQ ID NO: 14174 - DNA, 20 bp, Homo sapiens
agggcccgggaggacggcct

SEQ ID NO: 14175 - DNA, 19 bp, Homo sapiens
ggtggcccggggcgctcct

SEQ ID NO: 14176 - DNA, 21 bp, Homo sapiens
aggaggcctgggccacagcct

SEQ ID NO: 14177 - DNA, 19 bp, Homo sapiens
ggtggcctaaccaggacct

SEQ ID NO: 14178 - DNA, 18 bp, Homo sapiens
aggggctgccccagggtc

SEQ ID NO: 14179 - DNA, 16 bp, Homo sapiens
ggcggcccgaggggcc

SEQ ID NO: 14180 - DNA, 17 bp, Homo sapiens
aggggtccagccaagac

SEQ ID NO: 14181 - DNA, 21 bp, Homo sapiens
aggggccagggggacggatct

SEQ ID NO: 14182 - DNA, 19 bp, Homo sapiens
ggagcccggagctggacct

SEQ ID NO: 14183 - DNA, 16 bp, Homo sapiens
aggggcatgcaggacc

SEQ ID NO: 14184 - DNA, 18 bp, Homo sapiens
agggtcccagcagggcct

SEQ ID NO: 14185 - DNA, 21 bp, Homo sapiens
ggtggcccgcatgccgggcct

SEQ ID NO: 14186 - DNA, 20 bp, Homo sapiens
aggggccctaaaaagggcct

SEQ ID NO: 14187 - DNA, 17 bp, Homo sapiens
ggggcgcggcggggcct

SEQ ID NO: 14188 - DNA, 16 bp, Homo sapiens
ggggtccagagctgac

SEQ ID NO: 14189 - DNA, 18 bp, Homo sapiens
ggggtccgactgggacct

SEQ ID NO: 14190 - DNA, 21 bp, Homo sapiens
aggggttgtgggatgagacct

SEQ ID NO: 14191 - DNA, 18 bp, Homo sapiens
ggggcctaagcagggcct

SEQ ID NO: 14192 - DNA, 15 bp, Homo sapiens
aggggccagtttgga

SEQ ID NO: 14193 - DNA, 15 bp, Homo sapiens
agggccctggggacc

SEQ ID NO: 14194 - DNA, 24 bp, Homo sapiens
aggggtcaggggctcggtggacct

SEQ ID NO: 14195 - DNA, 15 bp, Homo sapiens
gggtgcccggggacc

SEQ ID NO: 14196 - DNA, 19 bp, Homo sapiens
aggggtcagggagcagcct

SEQ ID NO: 14197 - DNA, 19 bp, Homo sapiens
aggggccctggaatacagg

SEQ ID NO: 14198 - DNA, 18 bp, Homo sapiens
agggctcgggcgctgtgg

SEQ ID NO: 14199 - DNA, 19 bp, Homo sapiens
ggggccagggggccggcct

SEQ ID NO: 14200 - DNA, 18 bp, Homo sapiens
aggggcatggggctccct

SEQ ID NO: 14201 - DNA, 18 bp, Homo sapiens
aggggtcctgccgaggct

SEQ ID NO: 14202 - DNA, 18 bp, Homo sapiens
ggggccaggagactggga

SEQ ID NO: 14203 - DNA, 16 bp, Homo sapiens
gggacccggccggcct

SEQ ID NO: 14204 - DNA, 18 bp, Homo sapiens
aggaggcctggctgacct

SEQ ID NO: 14205 - DNA, 21 bp, Homo sapiens
aggggtctggagtggccacct

SEQ ID NO: 14206 - DNA, 18 bp, Homo sapiens
ggggttcgaagggggcct

SEQ ID NO: 14207 - DNA, 17 bp, Homo sapiens
aggggtctgggggaccc

SEQ ID NO: 14208 - DNA, 15 bp, Homo sapiens
aggggccagggaacc

SEQ ID NO: 14209 - DNA, 19 bp, Homo sapiens
ggggctaggtttgggatct

SEQ ID NO: 14210 - DNA, 18 bp, Homo sapiens
ggggccaggggcaacgct

SEQ ID NO: 14211 - DNA, 18 bp, Homo sapiens
ggggcccagtggtggcct

SEQ ID NO: 14212 - DNA, 18 bp, Homo sapiens
aggggccggggctggcct

SEQ ID NO: 14213 - DNA, 18 bp, Homo sapiens
agggacccatgaggacct

SEQ ID NO: 14214 - DNA, 18 bp, Homo sapiens
aggggctaggggctccct

SEQ ID NO: 14215 - DNA, 21 bp, Homo sapiens
ggggcccggccgtgggggcct

SEQ ID NO: 14216 - DNA, 18 bp, Homo sapiens
aggggtctgggggaacct

SEQ ID NO: 14217 - DNA, 18 bp, Homo sapiens
aggggtttgggattcaga

SEQ ID NO: 14218 - DNA, 18 bp, Homo sapiens
gggctccccacaggacct

SEQ ID NO: 14219 - DNA, 16 bp, Homo sapiens
aggggacctgggaacc

SEQ ID NO: 14220 - DNA, 19 bp, Homo sapiens
ggggccgggaagcggacct

SEQ ID NO: 14221 - DNA, 17 bp, Homo sapiens
ggggccagggccggcct

SEQ ID NO: 14222 - DNA, 21 bp, Homo sapiens
aggggccaggcttacagggct

SEQ ID NO: 14223 - DNA, 16 bp, Homo sapiens
aggggccggggctccc

SEQ ID NO: 14224 - DNA, 21 bp, Homo sapiens
ggggtctggggggcagaacct

SEQ ID NO: 14225 - DNA, 20 bp, Homo sapiens
ggagccaagggttagggcct

SEQ ID NO: 14226 - DNA, 18 bp, Homo sapiens
aggggtccggaggactct

SEQ ID NO: 14227 - DNA, 15 bp, Homo sapiens
ggagtccggggcccc

SEQ ID NO: 14228 - DNA, 17 bp, Homo sapiens
gggacccggggcagcct

SEQ ID NO: 14229 - DNA, 19 bp, Homo sapiens
aggaggtctggcaggacct

SEQ ID NO: 14230 - DNA, 20 bp, Homo sapiens
ggggcccgggccgcccgcct

SEQ ID NO: 14231 - DNA, 14 bp, Homo sapiens
ggggcccgggggcc

SEQ ID NO: 14232 - DNA, 21 bp, Homo sapiens
aggggccccgggagctggcct

SEQ ID NO: 14233 - DNA, 17 bp, Homo sapiens
ggggccgggggcagcct

SEQ ID NO: 14234 - DNA, 15 bp, Homo sapiens
aggggcccgcaggcc

SEQ ID NO: 14235 - DNA, 22 bp, Homo sapiens
ggagcccgggcagggcgggcct

SEQ ID NO: 14236 - DNA, 16 bp, Homo sapiens
ggccttgagaggtctc

SEQ ID NO: 14237 - DNA, 20 bp, Homo sapiens
aggcctcgggatcccacctc

SEQ ID NO: 14238 - DNA, 15 bp, Homo sapiens
ggcatcggggttgtc

SEQ ID NO: 14239 - DNA, 20 bp, Homo sapiens
aaggtctctggggtagctct

SEQ ID NO: 14240 - DNA, 22 bp, Homo sapiens
agggtcgtggagcaggtctcag

SEQ ID NO: 14241 - DNA, 21 bp, Homo sapiens
ggccttggaggtttttctcag

SEQ ID NO: 14242 - DNA, 22 bp, Homo sapiens
ggcgcttggggtaacaactcag

SEQ ID NO: 14243 - DNA, 18 bp, Homo sapiens
ggtcctgggggctgtctc

SEQ ID NO: 14244 - DNA, 17 bp, Homo sapiens
aaggtcttggggtggcc

SEQ ID NO: 14245 - DNA, 21 bp, Homo sapiens
ggccttggtggtgcatttcag

SEQ ID NO: 14246 - DNA, 24 bp, Homo sapiens
aaggcctcggtggtctcacctcag

SEQ ID NO: 14247 - DNA, 23 bp, Homo sapiens
aggtcctgagaaaagggtctcag

SEQ ID NO: 14248 - DNA, 19 bp, Homo sapiens
ggccttgaggttaatgcct

SEQ ID NO: 14249 - DNA, 16 bp, Homo sapiens
ggcctggaaggtctca

SEQ ID NO: 14250 - DNA, 18 bp, Homo sapiens
ggcctcggggtgaggttc

SEQ ID NO: 14251 - DNA, 100 bp, Human herpesvirus 7
ttgcttctgattccgacgggtcttcttcacgtacctctctatggctgcatctttatggccatagtgaggtacgtgtaggctacctgccggagaaaggcgg

SEQ ID NO: 14252 - DNA, 24 bp, Human herpesvirus 7
tacgtgtaggctacctgccggaga

SEQ ID NO: 14253 - DNA, 24 bp, Human herpesvirus 7
ttcacgtacctctctatggctgca

SEQ ID NO: 14254 - DNA, 21 bp, Homo sapiens
gcgtggggttacagcaggaga

SEQ ID NO: 14255 - DNA, 17 bp, Homo sapiens
gtacctctcgcagctgc

SEQ ID NO: 14256 - DNA, 17 bp, Homo sapiens
actacctctccttagtg

SEQ ID NO: 14257 - DNA, 18 bp, Homo sapiens
cattcctttttatggctg

SEQ ID NO: 14258 - DNA, 18 bp, Homo sapiens
cgtacctccagagctgca

SEQ ID NO: 14259 - DNA, 21 bp, Homo sapiens
ttcacatatttctttttctac

SEQ ID NO: 14260 - DNA, 18 bp, Homo sapiens
ttcacctacctctctgtg

SEQ ID NO: 14261 - DNA, 74 bp, Human herpesvirus 7
ttttaaagatccgtgggctggagctttaaaattctctattgttctttcaagttctgcaaaaatggtttttaaag

SEQ ID NO: 14262 - DNA, 24 bp, Human herpesvirus 7
ttaaagatccgtgggctggagctt

SEQ ID NO: 14263 - DNA, 24 bp, Human herpesvirus 7
caagttctgcaaaaatggttttta

SEQ ID NO: 14264 - DNA, 19 bp, Homo sapiens
agaacaatggttggagctt

SEQ ID NO: 14265 - DNA, 19 bp, Homo sapiens
ctaaagattagttggggct

SEQ ID NO: 14266 - DNA, 17 bp, Homo sapiens
agactgggttggagctt

SEQ ID NO: 14267 - DNA, 16 bp, Homo sapiens
agttccaatggttttt

SEQ ID NO: 14268 - DNA, 18 bp, Homo sapiens
caagttctgctgaggctt

SEQ ID NO: 14269 - DNA, 22 bp, Homo sapiens
caagctctgtgagattattttt

SEQ ID NO: 14270 - DNA, 17 bp, Homo sapiens
caagttctgaaaaatga

SEQ ID NO: 14271 - DNA, 19 bp, Homo sapiens
agttctgcaggaatagttt

SEQ ID NO: 14272 - DNA, 21 bp, Homo sapiens
caggttctgaaaacggcattt

SEQ ID NO: 14273 - DNA, 21 bp, Homo sapiens
tgagatctgtgaaaatagttt

SEQ ID NO: 14274 - DNA, 17 bp, Homo sapiens
caggctctgcagatttt

SEQ ID NO: 14275 - DNA, 18 bp, Homo sapiens
caagttctgcaagccttt

SEQ ID NO: 14276 - DNA, 22 bp, Homo sapiens
ggagcctgtaaagatggttttt

SEQ ID NO: 14277 - DNA, 19 bp, Homo sapiens
ttctgcaaaccaccatttt

SEQ ID NO: 14278 - DNA, 19 bp, Homo sapiens
caggttctcaaaggtcttc

SEQ ID NO: 14279 - DNA, 21 bp, Homo sapiens
agttctgcaagctatagtttt

SEQ ID NO: 14280 - DNA, 108 bp, Human herpesvirus 7
gcctttaggggtagtgtcgttgtcggggttaggcctgtaggggtagtgtcgttgtcggggttaggcctttaggggtagtgtcggggtcggggttaggcctttaggggc

SEQ ID NO: 14281 - DNA, 24 bp, Human herpesvirus 7
taggggtagtgtcgttgtcggggt

SEQ ID NO: 14282 - DNA, 24 bp, Human herpesvirus 7
cctttaggggtagtgtcggggtcg

SEQ ID NO: 14283 - DNA, 22 bp, Homo sapiens
ctttaggggtggctctgagggt

SEQ ID NO: 14284 - DNA, 66 bp, Melanoplus sanguinipes entomopoxvirus
gaaccagccctgcgcgcttgcgctatatacgccctgcgcactcatcgcgcatgcgcacagacgttc

SEQ ID NO: 14285 - DNA, 23 bp, Melanoplus sanguinipes entomopoxvirus
atcgcgcatgcgcacagacgttc

SEQ ID NO: 14286 - DNA, 24 bp, Melanoplus sanguinipes entomopoxvirus
gcgcgcttgcgctatatacgccct

SEQ ID NO: 14287 - DNA, 17 bp, Homo sapiens
gcgcgtgcgcacacgtt

SEQ ID NO: 14288 - DNA, 19 bp, Homo sapiens
gcgcctgcggaggcgtcct

SEQ ID NO: 14289 - DNA, 21 bp, Homo sapiens
gcacgcacgtgtgtgtgccct

SEQ ID NO: 14290 - DNA, 69 bp, Melanoplus sanguinipes entomopoxvirus
tccattgatctgctcacgactgtagcacttagaatcgcacagtgcacagccagtgagctggccacagga

SEQ ID NO: 14291 - DNA, 24 bp, Melanoplus sanguinipes entomopoxvirus
tgcacagccagtgagctggccaca

SEQ ID NO: 14292 - DNA, 24 bp, Melanoplus sanguinipes entomopoxvirus
gctcacgactgtagcacttagaat

SEQ ID NO: 14293 - DNA, 24 bp, Homo sapiens
tgcgggccagggctcctggccaca

SEQ ID NO: 14294 - DNA, 18 bp, Homo sapiens
gcctgcgcggagctggcc

SEQ ID NO: 14295 - DNA, 23 bp, Homo sapiens
tgcgcagccagttagcagccgca

SEQ ID NO: 14296 - DNA, 20 bp, Homo sapiens
tgacagccagtgagacttgg

SEQ ID NO: 14297 - DNA, 20 bp, Homo sapiens
gcaggcgtgagctggccaca

SEQ ID NO: 14298 - DNA, 20 bp, Homo sapiens
tgcgcagccagcggcctccc

SEQ ID NO: 14299 - DNA, 19 bp, Homo sapiens
tgcggcggcggaagctggc

SEQ ID NO: 14300 - DNA, 22 bp, Homo sapiens
tacatggccacccctggccaca

SEQ ID NO: 14301 - DNA, 20 bp, Homo sapiens
gccaggctcggctggccaca

SEQ ID NO: 14302 - DNA, 21 bp, Homo sapiens
tgtacggccagaaccggctac

SEQ ID NO: 14303 - DNA, 17 bp, Homo sapiens
tgcacagctagtaaatg

SEQ ID NO: 14304 - DNA, 18 bp, Homo sapiens
tgcccgccggagctggcc

SEQ ID NO: 14305 - DNA, 21 bp, Homo sapiens
tgcactggccagtgggccgca

SEQ ID NO: 14306 - DNA, 18 bp, Homo sapiens
gcaccccatcctggccac

SEQ ID NO: 14307 - DNA, 16 bp, Homo sapiens
tgcacagcagtggggc

SEQ ID NO: 14308 - DNA, 17 bp, Homo sapiens
tgccagctagtgagctg

SEQ ID NO: 14309 - DNA, 17 bp, Homo sapiens
tgcacagcagcagttgg

SEQ ID NO: 14310 - DNA, 22 bp, Homo sapiens
tgctggtccccaactggccaca

SEQ ID NO: 14311 - DNA, 22 bp, Homo sapiens
gcatggccagtggccaaccaca

SEQ ID NO: 14312 - DNA, 21 bp, Homo sapiens
tgccagccagtggtaggcaca

SEQ ID NO: 14313 - DNA, 20 bp, Homo sapiens
tgcaagctggctcttggcca

SEQ ID NO: 14314 - DNA, 23 bp, Homo sapiens
tgctggttggtgaactggccaca

SEQ ID NO: 14315 - DNA, 19 bp, Homo sapiens
tcatctgccaggcacttag

SEQ ID NO: 14316 - DNA, 84 bp, Gallid herpesvirus 2
ccgagcttaaaaaatattttattggcggtcaaagcatgctatccttcagcagatctgggaaatcatggatgtttggaggcttgg

SEQ ID NO: 14317 - DNA, 24 bp, Gallid herpesvirus 2
agatctgggaaatcatggatgttt

SEQ ID NO: 14318 - DNA, 24 bp, Gallid herpesvirus 2
tattttattggcggtcaaagcatg

SEQ ID NO: 14319 - DNA, 19 bp, Homo sapiens
aatcacaattatggatgtt

SEQ ID NO: 14320 - DNA, 17 bp, Homo sapiens
agatttgggaaatttgg

SEQ ID NO: 14321 - DNA, 21 bp, Homo sapiens
tctgggaagtcaccattgttt

SEQ ID NO: 14322 - DNA, 20 bp, Homo sapiens
agatttgggaaacagtgctt

SEQ ID NO: 14323 - DNA, 19 bp, Homo sapiens
ttccctgggcggtcagggc

SEQ ID NO: 14324 - DNA, 73 bp, Gallid herpesvirus 2
gagcgcagagctattaccgaagaagtctatccccccaaaatggatattttcgcatggaccaggtattgcgctc

SEQ ID NO: 14325 - DNA, 24 bp, Gallid herpesvirus 2
tcgcatggaccaggtattgcgctc

SEQ ID NO: 14326 - DNA, 24 bp, Gallid herpesvirus 2
accgaagaagtctatccccccaaa

SEQ ID NO: 14327 - DNA, 20 bp, Homo sapiens
tccatggaccagaggcctgc

SEQ ID NO: 14328 - DNA, 18 bp, Homo sapiens
gcatggaccaggctggct

SEQ ID NO: 14329 - DNA, 18 bp, Homo sapiens
tcgtgtggcccaggtacc

SEQ ID NO: 14330 - DNA, 19 bp, Homo sapiens
tcgcatggatggggacatc

SEQ ID NO: 14331 - DNA, 20 bp, Homo sapiens
tcgcatggactcggcgccct

SEQ ID NO: 14332 - DNA, 19 bp, Homo sapiens
gaggagcaacatcccccca

SEQ ID NO: 14333 - DNA, 17 bp, Homo sapiens
ccaagaagaaatccccc

SEQ ID NO: 14334 - DNA, 22 bp, Homo sapiens
ccagagaagactgcccttcaaa

SEQ ID NO: 14335 - DNA, 15 bp, Homo sapiens
aaagaaggcccccaa

SEQ ID NO: 14336 - DNA, 22 bp, Homo sapiens
accaaagaacagatgtccttcc

SEQ ID NO: 14337 - DNA, 16 bp, Homo sapiens
cggaagggaccccccc

SEQ ID NO: 14338 - DNA, 17 bp, Homo sapiens
cgaagagcccatccccc

SEQ ID NO: 14339 - DNA, 21 bp, Homo sapiens
cctgaagaagtggtggtccca

SEQ ID NO: 14340 - DNA, 20 bp, Homo sapiens
gatgaaaatgtcccctcaaa

SEQ ID NO: 14341 - DNA, 18 bp, Homo sapiens
gaagaagagtcccccaaa

SEQ ID NO: 14342 - DNA, 17 bp, Homo sapiens
gagagaagccccccaaa

SEQ ID NO: 14343 - DNA, 15 bp, Homo sapiens
accgggaagccccca

SEQ ID NO: 14344 - DNA, 16 bp, Homo sapiens
gaggaaagccccccaa

SEQ ID NO: 14345 - DNA, 20 bp, Homo sapiens
accaggaaatgcttccctcc

SEQ ID NO: 14346 - DNA, 22 bp, Homo sapiens
ccggatatcttattcccccaaa

SEQ ID NO: 14347 - DNA, 15 bp, Homo sapiens
acggaagaagctccc

SEQ ID NO: 14348 - DNA, 20 bp, Homo sapiens
ccaagaagtcaatgaatccc

SEQ ID NO: 14349 - DNA, 18 bp, Homo sapiens
ccgcggaagggcccccaa

SEQ ID NO: 14350 - DNA, 19 bp, Homo sapiens
gaacaaatatccccccaaa

SEQ ID NO: 14351 - DNA, 16 bp, Homo sapiens
accaaagattccctca

SEQ ID NO: 14352 - DNA, 19 bp, Homo sapiens
cgaagaccccccccccaaa

SEQ ID NO: 14353 - DNA, 22 bp, Homo sapiens
accaagaagtctgtacaccaaa

SEQ ID NO: 14354 - DNA, 82 bp, Fowl adenovirus D
cacgttgtgcgttctccgttgacctttgaaaaggcgcgtggtatttctcggtgtgtttttcgggcggattacgcgttacgtg

SEQ ID NO: 14355 - DNA, 24 bp, Fowl adenovirus D
ttcgggcggattacgcgttacgtg

SEQ ID NO: 14356 - DNA, 24 bp, Fowl adenovirus D
tctccgttgacctttgaaaaggcg

SEQ ID NO: 14357 - DNA, 18 bp, Homo sapiens
gggtggttatgtcacgtg

SEQ ID NO: 14358 - DNA, 14 bp, Homo sapiens
ccgttgacaaaagg

SEQ ID NO: 14359 - DNA, 20 bp, Homo sapiens
tcttcttgacctccaggagg

SEQ ID NO: 14360 - DNA, 67 bp, Fowl adenovirus D
gatcgtcagagcacggatgagcgagcagccggactcaccgccggagctctatccgtctctcctggtc

SEQ ID NO: 14361 - DNA, 24 bp, Fowl adenovirus D
tcagagcacggatgagcgagcagc

SEQ ID NO: 14362 - DNA, 24 bp, Fowl adenovirus D
ggagctctatccgtctctcctggt

SEQ ID NO: 14363 - DNA, 22 bp, Homo sapiens
ccagagcgcatgagcgagcggc

SEQ ID NO: 14364 - DNA, 19 bp, Homo sapiens
cagtgcggatgaactgcag

SEQ ID NO: 14365 - DNA, 20 bp, Homo sapiens
tcgcagcaccctgcgagcag

SEQ ID NO: 14366 - DNA, 20 bp, Homo sapiens
gagcacagaaacacagtggc

SEQ ID NO: 14367 - DNA, 16 bp, Homo sapiens
ccagggcgggcgagca

SEQ ID NO: 14368 - DNA, 20 bp, Homo sapiens
tcagagcaggggtggaaagc

SEQ ID NO: 14369 - DNA, 19 bp, Homo sapiens
gagcacgggtgcccgcggc

SEQ ID NO: 14370 - DNA, 21 bp, Homo sapiens
ccaggcaggtgagcgagcagc

SEQ ID NO: 14371 - DNA, 19 bp, Homo sapiens
gagtgtggtggtgagcagc

SEQ ID NO: 14372 - DNA, 22 bp, Homo sapiens
tccgggcacggatgggtgggcg

SEQ ID NO: 14373 - DNA, 20 bp, Homo sapiens
ccaggcggtgggcgagcagc

SEQ ID NO: 14374 - DNA, 16 bp, Homo sapiens
gagccgagcgagcggc

SEQ ID NO: 14375 - DNA, 23 bp, Homo sapiens
ggagctttcgttcctctcctggt

SEQ ID NO: 14376 - DNA, 18 bp, Homo sapiens
gggctcctgtcctcctgg

SEQ ID NO: 14377 - DNA, 21 bp, Homo sapiens
ggactttgtccgtctccgcct

SEQ ID NO: 14378 - DNA, 107 bp, Fowl adenovirus D
cccgtactccgttcgttttggacatcagccgtttgcccgtggtgccggagcgcattttgctgcacgactttccgaacggaccctggtcggaaacgatttggtacggg

SEQ ID NO: 14379 - DNA, 24 bp, Fowl adenovirus D
agccgtttgcccgtggtgccggag

SEQ ID NO: 14380 - DNA, 24 bp, Fowl adenovirus D
ctgcacgactttccgaacggaccc

SEQ ID NO: 14381 - DNA, 21 bp, Homo sapiens
agtcgtttgcctgctaaggag

SEQ ID NO: 14382 - DNA, 18 bp, Homo sapiens
gccgtttgtttggcgtga

SEQ ID NO: 14383 - DNA, 19 bp, Homo sapiens
tgcagactttccagctgac

SEQ ID NO: 14384 - DNA, 17 bp, Homo sapiens
ctgtagactttccacac

SEQ ID NO: 14385 - DNA, 20 bp, Homo sapiens
ctgctcgactttctggagga

SEQ ID NO: 14386 - DNA, 16 bp, Homo sapiens
ctgctcctgaatggac

SEQ ID NO: 14387 - DNA, 18 bp, Homo sapiens
ctgtacaactttctcaaa

SEQ ID NO: 14388 - DNA, 72 bp, Fowl adenovirus D
ttggatcttgtccatcaaagtttctctggatacatgtctggtcagattctgtatgtccgttctgaggtccga

SEQ ID NO: 14389 - DNA, 24 bp, Fowl adenovirus D
tggtcagattctgtatgtccgttc

SEQ ID NO: 14390 - DNA, 24 bp, Fowl adenovirus D
tccatcaaagtttctctggataca

SEQ ID NO: 14391 - DNA, 19 bp, Homo sapiens
tcaaagttagcctggtaca

SEQ ID NO: 14392 - DNA, 21 bp, Homo sapiens
tccatcaaagttctcctccac

SEQ ID NO: 14393 - DNA, 24 bp, Homo sapiens
cctgtcaagtgccagctggataca

SEQ ID NO: 14394 - DNA, 19 bp, Homo sapiens
catcaaagtataaagtaca

SEQ ID NO: 14395 - DNA, 17 bp, Homo sapiens
tccatggcctctggatc

SEQ ID NO: 14396 - DNA, 20 bp, Homo sapiens
cccgtcggccagctctggat

SEQ ID NO: 14397 - DNA, 17 bp, Homo sapiens
tcaaagtttttggaaca

SEQ ID NO: 14398 - DNA, 22 bp, Homo sapiens
tccatttaagtttccagaaata

SEQ ID NO: 14399 - DNA, 73 bp, Tupaia herpesvirus
ttttgctaggcaaaatggtgtgacacgacttggataccaagttgtgcctacattagccatttcagaagcaaaa

SEQ ID NO: 14400 - DNA, 24 bp, Tupaia herpesvirus
tgtgcctacattagccatttcaga

SEQ ID NO: 14401 - DNA, 24 bp, Tupaia herpesvirus
aatggtgtgacacgacttggatac

SEQ ID NO: 14402 - DNA, 23 bp, Homo sapiens
tgtccttgtgttagtacttcaga

SEQ ID NO: 14403 - DNA, 18 bp, Homo sapiens
tatgtttacacatttcag

SEQ ID NO: 14404 - DNA, 20 bp, Homo sapiens
gtgtctacacaacatttcag

SEQ ID NO: 14405 - DNA, 20 bp, Homo sapiens
tgtgcctaccattgggtcag

SEQ ID NO: 14406 - DNA, 18 bp, Homo sapiens
tgtgtccacattagccac

SEQ ID NO: 14407 - DNA, 19 bp, Homo sapiens
aatggtgtgctttgtggat

SEQ ID NO: 14408 - DNA, 18 bp, Homo sapiens
aatgatgtaaacttggat

SEQ ID NO: 14409 - DNA, 19 bp, Homo sapiens
aatggctccagcgacttgg

SEQ ID NO: 14410 - DNA, 17 bp, Homo sapiens
aatggtgcgatgccagg

SEQ ID NO: 14411 - DNA, 22 bp, Homo sapiens
atggtgtggatatccaacggat

SEQ ID NO: 14412 - DNA, 80 bp, Tupaia herpesvirus
gcggcagaggcggagatcgaggtccaagtccaggtcgcggtcgaggtcgcggtctcggctccgatctagatcccggtcgc

SEQ ID NO: 14413 - DNA, 24 bp, Tupaia herpesvirus
cggctccgatctagatcccggtcg

SEQ ID NO: 14414 - DNA, 24 bp, Tupaia herpesvirus
gaggtccaagtccaggtcgcggtc

SEQ ID NO: 14415 - DNA, 22 bp, Homo sapiens
cagctcctcatggtcccggtcg

SEQ ID NO: 14416 - DNA, 23 bp, Homo sapiens
ggtccaggttcatgcgcagggtc

SEQ ID NO: 14417 - DNA, 24 bp, Homo sapiens
gaggtccaggccaagtcactggtc

SEQ ID NO: 14418 - DNA, 23 bp, Homo sapiens
ggctccaggtccgcccgccggtc

SEQ ID NO: 14419 - DNA, 17 bp, Homo sapiens
gaggtccaatctagggc

SEQ ID NO: 14420 - DNA, 21 bp, Homo sapiens
gggtccggccaaggtcgcggt

SEQ ID NO: 14421 - DNA, 23 bp, Homo sapiens
aggtccaggtccaggtccaggtc

SEQ ID NO: 14422 - DNA, 21 bp, Homo sapiens
gaggccaagtccggcgcggtc

SEQ ID NO: 14423 - DNA, 62 bp, Tupaia herpesvirus
ggccgtggggggagcagggggagacggtcatcctccacctcccccacctcctccaaacggtc

SEQ ID NO: 14424 - DNA, 22 bp, Tupaia herpesvirus
cccccacctcctccaaacggtc

SEQ ID NO: 14425 - DNA, 24 bp, Tupaia herpesvirus
ggggggagcagggggagacggtca

SEQ ID NO: 14426 - DNA, 19 bp, Homo sapiens
cctgcatttcctccaagtc

SEQ ID NO: 14427 - DNA, 20 bp, Homo sapiens
cccccacccccttttaggtc

SEQ ID NO: 14428 - DNA, 16 bp, Homo sapiens
cccccacccccacagt

SEQ ID NO: 14429 - DNA, 25 bp, Homo sapiens
cccccgcctccctttgaccgtttgg

SEQ ID NO: 14430 - DNA, 21 bp, Homo sapiens
cctcctcctcctcgcctgggt

SEQ ID NO: 14431 - DNA, 20 bp, Homo sapiens
cccctgccccttccttagtc

SEQ ID NO: 14432 - DNA, 20 bp, Homo sapiens
ccccatttctttccagagtc

SEQ ID NO: 14433 - DNA, 19 bp, Homo sapiens
ccctgcctcccccactgcg

SEQ ID NO: 14434 - DNA, 23 bp, Homo sapiens
cctctcctgaaggacagacggtc

SEQ ID NO: 14435 - DNA, 25 bp, Homo sapiens
ccccacctcccttgcgaccgtttgg

SEQ ID NO: 14436 - DNA, 25 bp, Homo sapiens
cctccacctcctgggtacaagcggt

SEQ ID NO: 14437 - DNA, 22 bp, Homo sapiens
cccccacctcctatggacagtc

SEQ ID NO: 14438 - DNA, 17 bp, Homo sapiens
cccacacctcctctccg

SEQ ID NO: 14439 - DNA, 19 bp, Homo sapiens
cctccccctcctcccagtc

SEQ ID NO: 14440 - DNA, 23 bp, Homo sapiens
cctcacacctcctcccgcctgtc

SEQ ID NO: 14441 - DNA, 25 bp, Homo sapiens
ccccacccccttcttgaccgtttgg

SEQ ID NO: 14442 - DNA, 20 bp, Homo sapiens
cccctgccttcccctttggt

SEQ ID NO: 14443 - DNA, 20 bp, Homo sapiens
cccccctcctcatcttggtc

SEQ ID NO: 14444 - DNA, 25 bp, Homo sapiens
cccccacctctctttgaccgtttgg

SEQ ID NO: 14445 - DNA, 20 bp, Homo sapiens
cctccagctccaggacggtc

SEQ ID NO: 14446 - DNA, 21 bp, Homo sapiens
cccccaccccctcctagggtc

SEQ ID NO: 14447 - DNA, 18 bp, Homo sapiens
cctccccctccttcaggc

SEQ ID NO: 14448 - DNA, 25 bp, Homo sapiens
cccccacctccctttgaccgtttgg

SEQ ID NO: 14449 - DNA, 19 bp, Homo sapiens
cctccaactcttccaagtc

SEQ ID NO: 14450 - DNA, 21 bp, Homo sapiens
cccccatcatctctgactgtc

SEQ ID NO: 14451 - DNA, 19 bp, Homo sapiens
cccccaccccccttgtggt

SEQ ID NO: 14452 - DNA, 22 bp, Homo sapiens
cctcctcctcctcttccaagtc

SEQ ID NO: 14453 - DNA, 19 bp, Homo sapiens
cctcctcctcttccaagtc

SEQ ID NO: 14454 - DNA, 16 bp, Homo sapiens
cccccaccttcctggc

SEQ ID NO: 14455 - DNA, 23 bp, Homo sapiens
cccccacctgcctctagtaggtc

SEQ ID NO: 14456 - DNA, 15 bp, Homo sapiens
ccccaccccctcggt

SEQ ID NO: 14457 - DNA, 19 bp, Homo sapiens
ccccacctgggcagcggtc

SEQ ID NO: 14458 - DNA, 18 bp, Homo sapiens
ccctttcctcctccaggc

SEQ ID NO: 14459 - DNA, 19 bp, Homo sapiens
cccccaccccctctccggt

SEQ ID NO: 14460 - DNA, 15 bp, Homo sapiens
ccccaccttccgagt

SEQ ID NO: 14461 - DNA, 20 bp, Homo sapiens
ccccacccttcccctgaagt

SEQ ID NO: 14462 - DNA, 20 bp, Homo sapiens
cctccaccccccgcccggtc

SEQ ID NO: 14463 - DNA, 23 bp, Homo sapiens
ccccgccatttcctcctgcggtc

SEQ ID NO: 14464 - DNA, 25 bp, Homo sapiens
ccccacctctctggcgaccgtttgg

SEQ ID NO: 14465 - DNA, 23 bp, Homo sapiens
cccccaccttcctccagaaggtc

SEQ ID NO: 14466 - DNA, 18 bp, Homo sapiens
cctccaccccactacggt

SEQ ID NO: 14467 - DNA, 19 bp, Homo sapiens
ccaccacctcctgttgggt

SEQ ID NO: 14468 - DNA, 20 bp, Homo sapiens
cccccaccactgtcgcggtc

SEQ ID NO: 14469 - DNA, 18 bp, Homo sapiens
ccctcacctccttcaaac

SEQ ID NO: 14470 - DNA, 23 bp, Homo sapiens
ccccctcctccttgaccgtttgg

SEQ ID NO: 14471 - DNA, 17 bp, Homo sapiens
ccccaccttggaacggt

SEQ ID NO: 14472 - DNA, 17 bp, Homo sapiens
cctcccctcctccctgc

SEQ ID NO: 14473 - DNA, 21 bp, Homo sapiens
ccatgcctcctcctaccagtc

SEQ ID NO: 14474 - DNA, 16 bp, Homo sapiens
cctcctcctcctgatc

SEQ ID NO: 14475 - DNA, 19 bp, Homo sapiens
cccccacttccaccccgtc

SEQ ID NO: 14476 - DNA, 19 bp, Homo sapiens
cctccctttcctccagaac

SEQ ID NO: 14477 - DNA, 18 bp, Homo sapiens
cccccgccccctccaggc

SEQ ID NO: 14478 - DNA, 15 bp, Homo sapiens
cacctccttcaggcc

SEQ ID NO: 14479 - DNA, 16 bp, Homo sapiens
cctcctcctccagatc

SEQ ID NO: 14480 - DNA, 21 bp, Homo sapiens
cctcctcctcctcttacagtc

SEQ ID NO: 14481 - DNA, 18 bp, Homo sapiens
ccccgccccctccgggcc

SEQ ID NO: 14482 - DNA, 18 bp, Homo sapiens
cctcggcctcctccaggc

SEQ ID NO: 14483 - DNA, 17 bp, Homo sapiens
ccccacctgcctcatcg

SEQ ID NO: 14484 - DNA, 16 bp, Homo sapiens
cccccaccccttgggt

SEQ ID NO: 14485 - DNA, 21 bp, Homo sapiens
ccgctgcctcctccgcgcgtc

SEQ ID NO: 14486 - DNA, 18 bp, Homo sapiens
cctccacctccgcccagt

SEQ ID NO: 14487 - DNA, 21 bp, Homo sapiens
cctccccctcctcttcagggt

SEQ ID NO: 14488 - DNA, 22 bp, Homo sapiens
cctccacctcctcctcctgggt

SEQ ID NO: 14489 - DNA, 25 bp, Homo sapiens
cccccacctctcttcgaccgtttgg

SEQ ID NO: 14490 - DNA, 18 bp, Homo sapiens
cctccttctcctccaggc

SEQ ID NO: 14491 - DNA, 14 bp, Homo sapiens
ccccacccctccgg

SEQ ID NO: 14492 - DNA, 17 bp, Homo sapiens
cctccacctcctcgccg

SEQ ID NO: 14493 - DNA, 19 bp, Homo sapiens
cctcctcctcctcctggtc

SEQ ID NO: 14494 - DNA, 20 bp, Homo sapiens
cccacacctcctctagtgtc

SEQ ID NO: 14495 - DNA, 20 bp, Homo sapiens
cccctccagctcaaacggtc

SEQ ID NO: 14496 - DNA, 18 bp, Homo sapiens
ccccacctctctgaggtc

SEQ ID NO: 14497 - DNA, 21 bp, Homo sapiens
ccctcatgctctcctctggtc

SEQ ID NO: 14498 - DNA, 22 bp, Homo sapiens
cctcctcctcctcccgcgcgtc

SEQ ID NO: 14499 - DNA, 23 bp, Homo sapiens
cctccacctcccattgcaatggt

SEQ ID NO: 14500 - DNA, 17 bp, Homo sapiens
cctccccctcctccggc

SEQ ID NO: 14501 - DNA, 20 bp, Homo sapiens
cccccgccccctccccggtc

SEQ ID NO: 14502 - DNA, 22 bp, Homo sapiens
gggtgggagtaggaggtggtca

SEQ ID NO: 14503 - DNA, 23 bp, Homo sapiens
gggtggggcagggggataggggt

SEQ ID NO: 14504 - DNA, 19 bp, Homo sapiens
aggggagggggggacggtc

SEQ ID NO: 14505 - DNA, 23 bp, Homo sapiens
ggtggggtggggggcgggggtca

SEQ ID NO: 14506 - DNA, 19 bp, Homo sapiens
ggggcgcagggaggcggtc

SEQ ID NO: 14507 - DNA, 18 bp, Homo sapiens
ggagggagggaggcggtc

SEQ ID NO: 14508 - DNA, 19 bp, Homo sapiens
agggggaggtggggatggt

SEQ ID NO: 14509 - DNA, 21 bp, Homo sapiens
ggtgggagcagggaagggtca

SEQ ID NO: 14510 - DNA, 15 bp, Homo sapiens
ggggggcgggggggt

SEQ ID NO: 14511 - DNA, 18 bp, Homo sapiens
gggggtgggggcttgtca

SEQ ID NO: 14512 - DNA, 20 bp, Homo sapiens
ggagggaggactgaggtggt

SEQ ID NO: 14513 - DNA, 21 bp, Homo sapiens
ggggggaatgaaaaggcggtc

SEQ ID NO: 14514 - DNA, 19 bp, Homo sapiens
ggggggagtcggggggagg

SEQ ID NO: 14515 - DNA, 24 bp, Homo sapiens
gggaggggcaggggagagcggtca

SEQ ID NO: 14516 - DNA, 20 bp, Homo sapiens
gggggagcggacaggcggtc

SEQ ID NO: 14517 - DNA, 16 bp, Homo sapiens
gggaggagggggtggt

SEQ ID NO: 14518 - DNA, 100 bp, Variola virus
gcgtacctttttttcatccgatccctgccgggtaatacgtcccaagatttgctccatgttgtttctgcggggcgttgccatgatgatcgatgtcatatgc

SEQ ID NO: 14519 - DNA, 24 bp, Variola virus
tgccatgatgatcgatgtcatatg

SEQ ID NO: 14520 - DNA, 24 bp, Variola virus
tacgtcccaagatttgctccatgt

SEQ ID NO: 14521 - DNA, 19 bp, Homo sapiens
tgtcacgatgattggtgtc

SEQ ID NO: 14522 - DNA, 20 bp, Homo sapiens
tgccatgatgatgatgtcac

SEQ ID NO: 14523 - DNA, 18 bp, Homo sapiens
tgccctggtgatcatatg

SEQ ID NO: 14524 - DNA, 20 bp, Homo sapiens
gttccagaagcactccatgt

SEQ ID NO: 14525 - DNA, 17 bp, Homo sapiens
gtctcttttgctccatg

SEQ ID NO: 14526 - DNA, 19 bp, Homo sapiens
tactcccaggagccccatg

SEQ ID NO: 14527 - DNA, 92 bp, Variola virus
gccgataccttttcattaatacacacagggctaacgaagtcaggatgtccctgatattcgatttccctcacgtacccggaaaaggttgtggt

SEQ ID NO: 14528 - DNA, 24 bp, Variola virus
taccttttcattaatacacacagg

SEQ ID NO: 14529 - DNA, 24 bp, Variola virus
tgatattcgatttccctcacgtac

SEQ ID NO: 14530 - DNA, 18 bp, Homo sapiens
ctttttaaatcacacagg

SEQ ID NO: 14531 - DNA, 18 bp, Homo sapiens
cccttctgatacacacag

SEQ ID NO: 14532 - DNA, 17 bp, Homo sapiens
tttccaccacgcacagg

SEQ ID NO: 14533 - DNA, 15 bp, Homo sapiens
ttttcacttacacag

SEQ ID NO: 14534 - DNA, 21 bp, Homo sapiens
tttcttagaaatacacacggg

SEQ ID NO: 14535 - DNA, 23 bp, Homo sapiens
ctttttttaaacacacacacagg

SEQ ID NO: 14536 - DNA, 130 bp, Variola virus
agcgacacggggcgcgtcgtgtaaaccatgttaaacatttcaaactgctttcgcagcaatatgggaaaataaatgtattccccctgcagcgtgaaggcagtttcctgtcttatggctatgtgctttggct

SEQ ID NO: 14537 - DNA, 24 bp, Variola virus
cccctgcagcgtgaaggcagtttc

SEQ ID NO: 14538 - DNA, 24 bp, Variola virus
tcgcagcaatatgggaaaataaat

SEQ ID NO: 14539 - DNA, 18 bp, Homo sapiens
ctgcagtgtgaacagttc

SEQ ID NO: 14540 - DNA, 18 bp, Homo sapiens
ccttagagagggcagttt

SEQ ID NO: 14541 - DNA, 16 bp, Homo sapiens
ctgagcatggcagttt

SEQ ID NO: 14542 - DNA, 19 bp, Homo sapiens
cccttgcagtgtgaggggc

SEQ ID NO: 14543 - DNA, 21 bp, Homo sapiens
cccctgtgtttacagcagttt

SEQ ID NO: 14544 - DNA, 18 bp, Homo sapiens
ctccatggaaggcagttt

SEQ ID NO: 14545 - DNA, 18 bp, Homo sapiens
cccttccagtgtgaaggc

SEQ ID NO: 14546 - DNA, 18 bp, Homo sapiens
ccctggggaaggcagttt

SEQ ID NO: 14547 - DNA, 18 bp, Homo sapiens
cctgcagcgggagggggc

SEQ ID NO: 14548 - DNA, 20 bp, Homo sapiens
cctcaggaaggaggcagttt

SEQ ID NO: 14549 - DNA, 22 bp, Homo sapiens
ctgcttgagcgaaggcagtttc

SEQ ID NO: 14550 - DNA, 21 bp, Homo sapiens
tgcttgagatgggggcagttt

SEQ ID NO: 14551 - DNA, 22 bp, Homo sapiens
cttcagtgtgtccagcagtttc

SEQ ID NO: 14552 - DNA, 20 bp, Homo sapiens
cctgcctcctgaggcagttt

SEQ ID NO: 14553 - DNA, 21 bp, Homo sapiens
cctgggagtaataggcagttt

SEQ ID NO: 14554 - DNA, 19 bp, Homo sapiens
cccttcagttaggcagttt

SEQ ID NO: 14555 - DNA, 18 bp, Homo sapiens
tcgcagcattatcatgag

SEQ ID NO: 14556 - DNA, 18 bp, Homo sapiens
tcacagcaataaagaaaa

SEQ ID NO: 14557 - DNA, 22 bp, Homo sapiens
gcacaggctgaagaaaataaat

SEQ ID NO: 14558 - DNA, 18 bp, Homo sapiens
tcatagcaatataatgaa

SEQ ID NO: 14559 - DNA, 19 bp, Homo sapiens
gcaataaaaaaaaataaat

SEQ ID NO: 14560 - DNA, 80 bp, Variola virus
tagggctgctgatagctagcgctgcacttaaaaatggggtagccctttttcttgtaaatccggtgcctgtcgtagacctg

SEQ ID NO: 14561 - DNA, 22 bp, Variola virus
tccggtgcctgtcgtagacctg

SEQ ID NO: 14562 - DNA, 24 bp, Variola virus
tagctagcgctgcacttaaaaatg

SEQ ID NO: 14563 - DNA, 22 bp, Homo sapiens
tccggggctcggggtagacctg

SEQ ID NO: 14564 - DNA, 21 bp, Homo sapiens
ggtgcctggtaagttgatctg

SEQ ID NO: 14565 - DNA, 20 bp, Homo sapiens
ggtgcctgaaatgaggtctg

SEQ ID NO: 14566 - DNA, 19 bp, Homo sapiens
cctggtgcctgtgtctctg

SEQ ID NO: 14567 - DNA, 17 bp, Homo sapiens
cggttttgtcatagctg

SEQ ID NO: 14568 - DNA, 19 bp, Homo sapiens
cggggccaccacagacctg

SEQ ID NO: 14569 - DNA, 20 bp, Homo sapiens
tccggtgctggcttagtctg

SEQ ID NO: 14570 - DNA, 16 bp, Homo sapiens
tcctgtgcctgcaaac

SEQ ID NO: 14571 - DNA, 19 bp, Homo sapiens
tccggtgctgggggatctg

SEQ ID NO: 14572 - DNA, 18 bp, Homo sapiens
ggttcctgagcagacctg

SEQ ID NO: 14573 - DNA, 67 bp, Variola virus
gggtggctatctatccataggcaggcatccggcgtctttggtgcattggagatagtagctttcaccc

SEQ ID NO: 14574 - DNA, 24 bp, Variola virus
gtgcattggagatagtagctttca

SEQ ID NO: 14575 - DNA, 24 bp, Variola virus
atccataggcaggcatccggcgtc

SEQ ID NO: 14576 - DNA, 23 bp, Homo sapiens
gtgcattgggtaatcagtgcttt

SEQ ID NO: 14577 - DNA, 19 bp, Homo sapiens
tccgtaggcaggtccacgt

SEQ ID NO: 14578 - DNA, 20 bp, Homo sapiens
cctgtgggcaggcagatgtc

SEQ ID NO: 14579 - DNA, 17 bp, Homo sapiens
tccgaggcaggcccagc

SEQ ID NO: 14580 - DNA, 125 bp, Variola virus
cgaggaataataagaacaaagtaatgcctgtaaaaataaacatcaacattgtatgatggtcattaaaccaattagtatgacgttgaactaatttcacagtagattttattccggtgttatcctcg

SEQ ID NO: 14581 - DNA, 24 bp, Variola virus
tttcacagtagattttattccggt

SEQ ID NO: 14582 - DNA, 24 bp, Variola virus
tgcctgtaaaaataaacatcaaca

SEQ ID NO: 14583 - DNA, 19 bp, Homo sapiens
gcagactcattattctggt

SEQ ID NO: 14584 - DNA, 21 bp, Homo sapiens
tttcacagtgatttctggggt

SEQ ID NO: 14585 - DNA, 18 bp, Homo sapiens
tgcctgtaaaattataaa

SEQ ID NO: 14586 - DNA, 21 bp, Homo sapiens
tgcctgtagaagggacaaaca

SEQ ID NO: 14587 - DNA, 15 bp, Homo sapiens
ctgataaacatcaac

SEQ ID NO: 14588 - DNA, 21 bp, Homo sapiens
tgcctgtaagaaataacaaca

SEQ ID NO: 14589 - DNA, 18 bp, Homo sapiens
taaaaataaatatcaaca

SEQ ID NO: 14590 - DNA, 20 bp, Homo sapiens
tgtctgtaagtacatcaaca

SEQ ID NO: 14591 - DNA, 21 bp, Homo sapiens
tgcctgtaccaataatatcaa

SEQ ID NO: 14592 - DNA, 19 bp, Homo sapiens
tgcttcacaaacatcaaca

SEQ ID NO: 14593 - DNA, 18 bp, Homo sapiens
tgcctataaacttatcaa

SEQ ID NO: 14594 - DNA, 96 bp, Variola virus
gtggcccaacctctgctcccctctattctcctcttgcgttatctccaatagaatttgcttgaggtcatacgttttagggtgctcgacctgggccgc

SEQ ID NO: 14595 - DNA, 24 bp, Variola virus
cttgaggtcatacgttttagggtg

SEQ ID NO: 14596 - DNA, 24 bp, Variola virus
cccctctattctcctcttgcgtta

SEQ ID NO: 14597 - DNA, 22 bp, Homo sapiens
cttgaggtctgctgtgggggtg

SEQ ID NO: 14598 - DNA, 21 bp, Homo sapiens
ttggggtctgctgccagggtg

SEQ ID NO: 14599 - DNA, 22 bp, Homo sapiens
cctctccgttctcttttcatta

SEQ ID NO: 14600 - DNA, 18 bp, Homo sapiens
cctctgttcacttgggtt

SEQ ID NO: 14601 - DNA, 16 bp, Homo sapiens
ccctcccttttgtgtt

SEQ ID NO: 14602 - DNA, 20 bp, Homo sapiens
cccctttattccccttcttg

SEQ ID NO: 14603 - DNA, 20 bp, Homo sapiens
cctctttttttttcccctct

SEQ ID NO: 14604 - DNA, 21 bp, Homo sapiens
cccctctaatttcctctccca

SEQ ID NO: 14605 - DNA, 17 bp, Homo sapiens
ccctctgtctctcctgc

SEQ ID NO: 14606 - DNA, 17 bp, Homo sapiens
ccctttattcttttcgc

SEQ ID NO: 14607 - DNA, 17 bp, Homo sapiens
tattctccattgcctta

SEQ ID NO: 14608 - DNA, 20 bp, Homo sapiens
ccccttattctccttttcat

SEQ ID NO: 14609 - DNA, 19 bp, Homo sapiens
cccctttttttcctcactg

SEQ ID NO: 14610 - DNA, 15 bp, Homo sapiens
cctcattctctttac

SEQ ID NO: 14611 - DNA, 18 bp, Homo sapiens
tctttgctcttctcgcgt

SEQ ID NO: 14612 - DNA, 16 bp, Homo sapiens
ctctattcctttggtt

SEQ ID NO: 14613 - DNA, 19 bp, Homo sapiens
cccttctcttctcctcctg

SEQ ID NO: 14614 - DNA, 19 bp, Homo sapiens
ccttctgttccctctcagt

SEQ ID NO: 14615 - DNA, 16 bp, Homo sapiens
ctctattctttgccct

SEQ ID NO: 14616 - DNA, 16 bp, Homo sapiens
cccctttattttcttg

SEQ ID NO: 14617 - DNA, 60 bp, Cowpox virus
tgtcggagagtaaacattgacggataaaacaaaaatgctccgcataactctaccatggca

SEQ ID NO: 14618 - DNA, 24 bp, Cowpox virus
tcggagagtaaacattgacggata

SEQ ID NO: 14619 - DNA, 18 bp, Cowpox virus
cataactctaccatggca

SEQ ID NO: 14620 - DNA, 19 bp, Homo sapiens
agagtaaacagaagtggat

SEQ ID NO: 14621 - DNA, 19 bp, Homo sapiens
ggagagtacagtgtgagat

SEQ ID NO: 14622 - DNA, 16 bp, Homo sapiens
cataacccaacgggca

SEQ ID NO: 14623 - DNA, 18 bp, Homo sapiens
cataaccctaacatggca

SEQ ID NO: 14624 - DNA, 20 bp, Homo sapiens
ataactccaggtcctgtggc

SEQ ID NO: 14625 - DNA, 16 bp, Homo sapiens
caccatcaccatggca

SEQ ID NO: 14626 - DNA, 19 bp, Homo sapiens
cacagcttccactatggca

SEQ ID NO: 14627 - DNA, 19 bp, Homo sapiens
cataaccctgtctctggca

SEQ ID NO: 14628 - DNA, 16 bp, Homo sapiens
cacaactccgcaggca

SEQ ID NO: 14629 - DNA, 17 bp, Homo sapiens
cataactccccaaggca

SEQ ID NO: 14630 - DNA, 19 bp, Homo sapiens
cataaccacagcaatggca

SEQ ID NO: 14631 - DNA, 18 bp, Homo sapiens
cacaactctcacagggca

SEQ ID NO: 14632 - DNA, 18 bp, Homo sapiens
cataatagctccatggca

SEQ ID NO: 14633 - DNA, 16 bp, Homo sapiens
catatacgccatggca

SEQ ID NO: 14634 - DNA, 131 bp, Cowpox virus
cgatttcgagaaataataagaataaagtaatgcctgtaaagataaacatcaacattgtttggtaatcattaaaccaattagtatgacgttgaactaatttcacagtagattttattccagtgttatcctcg

SEQ ID NO: 14635 - DNA, 24 bp, Cowpox virus
tgtaaagataaacatcaacattgt

SEQ ID NO: 14636 - DNA, 24 bp, Cowpox virus
ttagtatgacgttgaactaatttc

SEQ ID NO: 14637 - DNA, 21 bp, Homo sapiens
tgtaatgattagcaacattgt

SEQ ID NO: 14638 - DNA, 61 bp, Rice yellow mottle virus
tccacatcggcagatgcgacgacatacgattgtgtgccgtttaatctgcctcgggtgtgga

SEQ ID NO: 14639 - DNA, 24 bp, Rice yellow mottle virus
catcggcagatgcgacgacatacg

SEQ ID NO: 14640 - DNA, 24 bp, Rice yellow mottle virus
tgccgtttaatctgcctcgggtgt

SEQ ID NO: 14641 - DNA, 18 bp, Homo sapiens
taccgtttaatttgcttc

SEQ ID NO: 14642 - DNA, 107 bp, Murid herpesvirus 4
ctgggtttgtgtgccgacttgttccttttaccctttgatgacttactgccctgacctgacccgtctaccgcctcctcatcacctttagaacactccctcacgcccag

SEQ ID NO: 14643 - DNA, 24 bp, Murid herpesvirus 4
accctttgatgacttactgccctg

SEQ ID NO: 14644 - DNA, 22 bp, Murid herpesvirus 4
tagaacactccctcacgcccag

SEQ ID NO: 14645 - DNA, 19 bp, Homo sapiens
cttttgtggtgttactgcc

SEQ ID NO: 14646 - DNA, 18 bp, Homo sapiens
tttgtgtttactgccctg

SEQ ID NO: 14647 - DNA, 21 bp, Homo sapiens
cccttggtcacagctgctctg

SEQ ID NO: 14648 - DNA, 20 bp, Homo sapiens
cttgttcccttactgctctg

SEQ ID NO: 14649 - DNA, 21 bp, Homo sapiens
accctctgaaacaggctgtct

SEQ ID NO: 14650 - DNA, 21 bp, Homo sapiens
ctttggtatgctgctgccctg

SEQ ID NO: 14651 - DNA, 16 bp, Homo sapiens
cccttcttactgccct

SEQ ID NO: 14652 - DNA, 16 bp, Homo sapiens
cttgatgatacttcct

SEQ ID NO: 14653 - DNA, 22 bp, Homo sapiens
tagaacccgggagaacgcccag

SEQ ID NO: 14654 - DNA, 18 bp, Homo sapiens
tagaacacttgttctacg

SEQ ID NO: 14655 - DNA, 22 bp, Homo sapiens
taggcactccctttcaatccag

SEQ ID NO: 14656 - DNA, 19 bp, Homo sapiens
caggacactccccgtccag

SEQ ID NO: 14657 - DNA, 17 bp, Homo sapiens
gaacacccctatcaccc

SEQ ID NO: 14658 - DNA, 21 bp, Homo sapiens
tagaacacatctaggaaccag

SEQ ID NO: 14659 - DNA, 20 bp, Homo sapiens
agggcactcccggttcccag

SEQ ID NO: 14660 - DNA, 19 bp, Homo sapiens
aaacactccccatgttcag

SEQ ID NO: 14661 - DNA, 16 bp, Homo sapiens
agaacactctcacgcc

SEQ ID NO: 14662 - DNA, 18 bp, Homo sapiens
tagaacacttccttctcc

SEQ ID NO: 14663 - DNA, 19 bp, Homo sapiens
tagaatcttttacacccag

SEQ ID NO: 14664 - DNA, 20 bp, Homo sapiens
tagaacactccattcccaca

SEQ ID NO: 14665 - DNA, 60 bp, Murid herpesvirus 4
acatagcccaaatggacacttgcggttaggacaaaaccgcaagcggtcgataggccatgt

SEQ ID NO: 14666 - DNA, 24 bp, Murid herpesvirus 4
aaatggacacttgcggttaggaca

SEQ ID NO: 14667 - DNA, 21 bp, Murid herpesvirus 4
caagcggtcgataggccatgt

SEQ ID NO: 14668 - DNA, 17 bp, Homo sapiens
tggacacctgtgccaag

SEQ ID NO: 14669 - DNA, 17 bp, Homo sapiens
ggatggaatggttagga

SEQ ID NO: 14670 - DNA, 15 bp, Homo sapiens
aaatgggccttagga

SEQ ID NO: 14671 - DNA, 16 bp, Homo sapiens
tggctgctgttaggac

SEQ ID NO: 14672 - DNA, 18 bp, Homo sapiens
aaatagacatttgtagac

SEQ ID NO: 14673 - DNA, 15 bp, Homo sapiens
atgggcaagttagga

SEQ ID NO: 14674 - DNA, 16 bp, Homo sapiens
tggacactcacagggc

SEQ ID NO: 14675 - DNA, 18 bp, Homo sapiens
ggatggacactgatcaag

SEQ ID NO: 14676 - DNA, 20 bp, Homo sapiens
tgggcacttacagaagggca

SEQ ID NO: 14677 - DNA, 20 bp, Homo sapiens
cagccgcaccggggccatgt

SEQ ID NO: 14678 - DNA, 25 bp, Homo sapiens
agcggtcgaggggatgggctatgta

SEQ ID NO: 14679 - DNA, 17 bp, Homo sapiens
agctgggagggccatgt

SEQ ID NO: 14680 - DNA, 21 bp, Homo sapiens
agcggccggttagcggcgtgt

SEQ ID NO: 14681 - DNA, 15 bp, Homo sapiens
gcactcaggccatgt

SEQ ID NO: 14682 - DNA, 19 bp, Homo sapiens
caagggagtctggccatgt

SEQ ID NO: 14683 - DNA, 60 bp, Saccharomyces cerevisiae killer virus M1
ctcttatttttaaattaatgtgtcccaattagaaacccaagcgcagaaattagttgagag

SEQ ID NO: 14684 - DNA, 17 bp, Saccharomyces cerevisiae killer virus M1
cagaaattagttgagag

SEQ ID NO: 14685 - DNA, 24 bp, Saccharomyces cerevisiae killer virus M1
cttatttttaaattaatgtgtccc

SEQ ID NO: 14686 - DNA, 25 bp, Homo sapiens
ttatttttacatttgctaagtgtcc

SEQ ID NO: 14687 - DNA, 65 bp, Amsacta moorei entomopoxvirus
ggcttgagctacaccccccagttcccgcgtcggtaactagggttaaaggtttggcagattttgcc

SEQ ID NO: 14688 - DNA, 24 bp, Amsacta moorei entomopoxvirus
taactagggttaaaggtttggcag

SEQ ID NO: 14689 - DNA, 24 bp, Amsacta moorei entomopoxvirus
tgagctacaccccccagttcccgc

SEQ ID NO: 14690 - DNA, 20 bp, Homo sapiens
tggctacaccttaagattcc

SEQ ID NO: 14691 - DNA, 22 bp, Homo sapiens
gccagaattccccagttcccgc

SEQ ID NO: 14692 - DNA, 18 bp, Homo sapiens
tggctgcgccccagcccg

SEQ ID NO: 14693 - DNA, 16 bp, Homo sapiens
agccaccccagttccg

SEQ ID NO: 14694 - DNA, 15 bp, Homo sapiens
gagctacacttcccg

SEQ ID NO: 14695 - DNA, 18 bp, Homo sapiens
tgggcacaccccctggct

SEQ ID NO: 14696 - DNA, 15 bp, Homo sapiens
tgagctgagctcccg

SEQ ID NO: 14697 - DNA, 21 bp, Homo sapiens
tgggctggaccccacccccgc

SEQ ID NO: 14698 - DNA, 24 bp, Homo sapiens
tgggcagtattctccagctcccgc

SEQ ID NO: 14699 - DNA, 20 bp, Homo sapiens
tgggccgtgtccccacagct

SEQ ID NO: 14700 - DNA, 23 bp, Homo sapiens
tgggctggcccccggtcacccgc

SEQ ID NO: 14701 - DNA, 117 bp, Amsacta moorei entomopoxvirus
gcccctaaaaaggatccttatgatggccttgtattttgggaggttgatttaaaggacaaactatccacagatttagatcagtttcctttgggccgtaagtttcttttgcaactgggt

SEQ ID NO: 14702 - DNA, 24 bp, Amsacta moorei entomopoxvirus
ttagatcagtttcctttgggccgt

SEQ ID NO: 14703 - DNA, 24 bp, Amsacta moorei entomopoxvirus
tccttatgatggccttgtattttg

SEQ ID NO: 14704 - DNA, 18 bp, Homo sapiens
ttagatcagattcttttg

SEQ ID NO: 14705 - DNA, 17 bp, Homo sapiens
ttacatcagtttcttta

SEQ ID NO: 14706 - DNA, 73 bp, Amsacta moorei entomopoxvirus
ccaggcacatctgctaatagtaggaacactcttaccagctacatctatgctcctactcctagtggctccctgg

SEQ ID NO: 14707 - DNA, 24 bp, Amsacta moorei entomopoxvirus
ctcctactcctagtggctccctgg

SEQ ID NO: 14708 - DNA, 24 bp, Amsacta moorei entomopoxvirus
tgctaatagtaggaacactcttac

SEQ ID NO: 14709 - DNA, 16 bp, Homo sapiens
ctcctactctaactct

SEQ ID NO: 14710 - DNA, 16 bp, Homo sapiens
ctcctcctccctccct

SEQ ID NO: 14711 - DNA, 21 bp, Homo sapiens
cctgcttcaccctctccctgg

SEQ ID NO: 14712 - DNA, 21 bp, Homo sapiens
ctccttttctgaagcccctgg

SEQ ID NO: 14713 - DNA, 19 bp, Homo sapiens
cctactccccgctccctgg

SEQ ID NO: 14714 - DNA, 23 bp, Homo sapiens
ctccctatttgagtgctccttgg

SEQ ID NO: 14715 - DNA, 21 bp, Homo sapiens
ctactcctacagtgtttctgg

SEQ ID NO: 14716 - DNA, 22 bp, Homo sapiens
ctactcctacaagtttttctgg

SEQ ID NO: 14717 - DNA, 20 bp, Homo sapiens
ctcctactggggcttcctgg

SEQ ID NO: 14718 - DNA, 18 bp, Homo sapiens
tcctactcttcgtcggct

SEQ ID NO: 14719 - DNA, 20 bp, Homo sapiens
tcctttctcctcctccctgg

SEQ ID NO: 14720 - DNA, 21 bp, Homo sapiens
ctctggctcccctctccctgg

SEQ ID NO: 14721 - DNA, 24 bp, Homo sapiens
cccctactcgctcgggttttctgg

SEQ ID NO: 14722 - DNA, 20 bp, Homo sapiens
cctactccacgtctccttgg

SEQ ID NO: 14723 - DNA, 18 bp, Homo sapiens
ctcctgcgcctctccctg

SEQ ID NO: 14724 - DNA, 19 bp, Homo sapiens
cttttcctagcaaccctgg

SEQ ID NO: 14725 - DNA, 20 bp, Homo sapiens
tacttttgctagctccctgg

SEQ ID NO: 14726 - DNA, 19 bp, Homo sapiens
cccctgctttacctccctg

SEQ ID NO: 14727 - DNA, 24 bp, Homo sapiens
tcctatcctagtgggtgagactgg

SEQ ID NO: 14728 - DNA, 19 bp, Homo sapiens
ctcctcttactgttctctg

SEQ ID NO: 14729 - DNA, 23 bp, Homo sapiens
ccctgctcctagtttccacttgg

SEQ ID NO: 14730 - DNA, 98 bp, Encephalomyocarditis virus
tcagaaagaggtttaatatttttgtgagaccatcgaagagagaaagagataaaactttttttacgactccatcagaaagaggtttaatatttttgtga

SEQ ID NO: 14731 - DNA, 24 bp, Encephalomyocarditis virus
tatttttgtgagaccatcgaagag

SEQ ID NO: 14732 - DNA, 27 bp, Homo sapiens
tccatcagggaaaggtcagatcatatt

SEQ ID NO: 14733 - DNA, 17 bp, Homo sapiens
tccacgggaagaggttt

SEQ ID NO: 14734 - DNA, 23 bp, Homo sapiens
tccatcaggagacctctaatatt

SEQ ID NO: 14735 - DNA, 17 bp, Homo sapiens
agaaagcattcaatatt

SEQ ID NO: 14736 - DNA, 20 bp, Homo sapiens
ccatcttaaggtttaatatt

SEQ ID NO: 14737 - DNA, 18 bp, Homo sapiens
tatttttgtaagaaaaga

SEQ ID NO: 14738 - DNA, 17 bp, Homo sapiens
tttttgtgagaaaaaga

SEQ ID NO: 14739 - DNA, 16 bp, Homo sapiens
tatttttttgagacag

SEQ ID NO: 14740 - DNA, 130 bp, Encephalomyocarditis virus
ttttttacgactccatcagaaagaggtttaatatttttgtgagaccatcgaagagagaaagagataaaactttttttacgactccatcagaaagaggtttaatatttttgtgagaccatcgaagagagaa

SEQ ID NO: 14741 - DNA, 129 bp, Encephalomyocarditis virus
cttttttacgactccatcagaaagaggtttaatatttttgtgagaccatcgaagagagaaagagataaaactttttttacgactccatcagaaagaggtttaatatttttgtgagaccatcgaagagag

SEQ ID NO: 14742 - DNA, 126 bp, Equine herpesvirus 1
acctctttctgatggagtcgtaaaaaaagttttatctctttctctcttcgatggtctcacaaaaatattaaacctctttctgatggagtcgtaaaaaaagttttatctctttctctcttcgatggt

SEQ ID NO: 14743 - DNA, 24 bp, Equine herpesvirus 1
tgatggagtcgtaaaaaaagtttt

SEQ ID NO: 14744 - DNA, 24 bp, Equine herpesvirus 1
cgtaaaaaaagttttatctctttc

SEQ ID NO: 14745 - DNA, 23 bp, Homo sapiens
tgatggagttttagaaaaatttt

SEQ ID NO: 14746 - DNA, 21 bp, Homo sapiens
gtgaaaaaagttttagccctc

SEQ ID NO: 14747 - DNA, 17 bp, Homo sapiens
aaaagttgctccctttc

SEQ ID NO: 14748 - DNA, 18 bp, Homo sapiens
aaaaaagtaaatctcttt

SEQ ID NO: 14749 - DNA, 19 bp, Homo sapiens
aaaaaaaacttatctcttt

SEQ ID NO: 14750 - DNA, 22 bp, Homo sapiens
gtaggcaaagttttcctctttc

SEQ ID NO: 14751 - DNA, 125 bp, Equine herpesvirus 1
acctctttctgatggagtcgtaaaaaagttttatctctttctctcttcgatggtctcacaaaaatattaaacctctttctgatggagtcgtaaaaaaagttttatctctttctctcttcgatggt

SEQ ID NO: 14752 - DNA, 24 bp, Equine herpesvirus 1
cgtaaaaaagttttatctctttct

SEQ ID NO: 14753 - DNA, 66 bp, Equine herpesvirus 1
tctcaataaagaaataaatatatctttgttaaatatgttaactttttgtatatttctatattgtga

SEQ ID NO: 14754 - DNA, 24 bp, Equine herpesvirus 1
agaaataaatatatctttgttaaa

SEQ ID NO: 14755 - DNA, 24 bp, Equine herpesvirus 1
aactttttgtatatttctatattg

SEQ ID NO: 14756 - DNA, 17 bp, Homo sapiens
agaataaatatatcccc

SEQ ID NO: 14757 - DNA, 21 bp, Homo sapiens
agaggtaaatgcatctttgtt

SEQ ID NO: 14758 - DNA, 22 bp, Homo sapiens
gaaataaaaaccatttgttaaa

SEQ ID NO: 14759 - DNA, 109 bp, Human herpesvirus 5
tatgaggttcgaccagcggctgctggaagagggcgacgaggaggatgaagtgaccgtgatgtcgccgtcacccgagcccgtgcaacagcagccgccggtcgagcccgtg

SEQ ID NO: 14760 - DNA, 24 bp, Human herpesvirus 5
agcggctgctggaagagggcgacg

SEQ ID NO: 14761 - DNA, 24 bp, Human herpesvirus 5
tgcaacagcagccgccggtcgagc

SEQ ID NO: 14762 - DNA, 18 bp, Homo sapiens
agcggctgtggggaggcg

SEQ ID NO: 14763 - DNA, 20 bp, Homo sapiens
ggctgctgttggagaaggcg

SEQ ID NO: 14764 - DNA, 19 bp, Homo sapiens
agcgggtgttggaagagcg

SEQ ID NO: 14765 - DNA, 18 bp, Homo sapiens
gcggctgtgggaagtacg

SEQ ID NO: 14766 - DNA, 18 bp, Homo sapiens
gcggctgcaggaaggggc

SEQ ID NO: 14767 - DNA, 17 bp, Homo sapiens
ggcgctggaggggggcg

SEQ ID NO: 14768 - DNA, 18 bp, Homo sapiens
agggcttgtggagggcga

SEQ ID NO: 14769 - DNA, 22 bp, Homo sapiens
gcggctgcgggaggccagggcg

SEQ ID NO: 14770 - DNA, 17 bp, Homo sapiens
agggctgctgggagagc

SEQ ID NO: 14771 - DNA, 19 bp, Homo sapiens
gcggctgcggggcgcggcg

SEQ ID NO: 14772 - DNA, 16 bp, Homo sapiens
gcggcggcgggggcgc

SEQ ID NO: 14773 - DNA, 17 bp, Homo sapiens
gcggctgctggtgagca

SEQ ID NO: 14774 - DNA, 23 bp, Homo sapiens
gcggctgcggctcccgggcggcg

SEQ ID NO: 14775 - DNA, 15 bp, Homo sapiens
ggctgctgcggcgac

SEQ ID NO: 14776 - DNA, 23 bp, Homo sapiens
ggctgctggatgctttggcggcg

SEQ ID NO: 14777 - DNA, 20 bp, Homo sapiens
agctttctgggagagggcga

SEQ ID NO: 14778 - DNA, 17 bp, Homo sapiens
gcggcgctggagggaac

SEQ ID NO: 14779 - DNA, 16 bp, Homo sapiens
ggtgttggagaagacg

SEQ ID NO: 14780 - DNA, 17 bp, Homo sapiens
ggctgctggggggggcg

SEQ ID NO: 14781 - DNA, 23 bp, Homo sapiens
gcggctgcgggactcgcgtggcg

SEQ ID NO: 14782 - DNA, 21 bp, Homo sapiens
agggctgctggggcttgaggg

SEQ ID NO: 14783 - DNA, 21 bp, Homo sapiens
gctggctgctgggactgggcg

SEQ ID NO: 14784 - DNA, 16 bp, Homo sapiens
gctgctgctgggggca

SEQ ID NO: 14785 - DNA, 21 bp, Homo sapiens
gcggctgcggcctcggcggcg

SEQ ID NO: 14786 - DNA, 18 bp, Homo sapiens
gcggctgcggcggcggcg

SEQ ID NO: 14787 - DNA, 21 bp, Homo sapiens
gcggctgcgtcctgggcggcg

SEQ ID NO: 14788 - DNA, 23 bp, Homo sapiens
ggctgcccgtagggagggcgacg

SEQ ID NO: 14789 - DNA, 16 bp, Homo sapiens
gcggcagagagggcgc

SEQ ID NO: 14790 - DNA, 20 bp, Homo sapiens
agtgtctgctggacgcagcg

SEQ ID NO: 14791 - DNA, 21 bp, Homo sapiens
agcggctgcagggccgcggcg

SEQ ID NO: 14792 - DNA, 22 bp, Homo sapiens
agggctcccggagggggcgacg

SEQ ID NO: 14793 - DNA, 22 bp, Homo sapiens
ggctgtgcaggagggggcgacg

SEQ ID NO: 14794 - DNA, 22 bp, Homo sapiens
agtggcagctggagttacaggg

SEQ ID NO: 14795 - DNA, 22 bp, Homo sapiens
agcgatggccgagagggcggcg

SEQ ID NO: 14796 - DNA, 64 bp, Human herpesvirus 5
ctatatgaacttatgtgcctgtcatgccagccagagttgtggacaacaaacataattattatag

SEQ ID NO: 14797 - DNA, 24 bp, Human herpesvirus 5
tgtggacaacaaacataattatta

SEQ ID NO: 14798 - DNA, 24 bp, Human herpesvirus 5
tatgtgcctgtcatgccagccaga

SEQ ID NO: 14799 - DNA, 22 bp, Homo sapiens
tgtggacagctgaatccttatt

SEQ ID NO: 14800 - DNA, 18 bp, Homo sapiens
tgtgcctgccacccccag

SEQ ID NO: 14801 - DNA, 20 bp, Homo sapiens
gtgcctgtcccagaagccag

SEQ ID NO: 14802 - DNA, 20 bp, Homo sapiens
tgggctctcgtgccagccag

SEQ ID NO: 14803 - DNA, 19 bp, Homo sapiens
tgtgcctgtcgctgcgggc

SEQ ID NO: 14804 - DNA, 20 bp, Homo sapiens
tgtatttccatgccagccag

SEQ ID NO: 14805 - DNA, 96 bp, Human herpesvirus 5
gtggttgtaacagttgcttcgagttgtgaattagaatcgttacaaatcttacgtgcgacgttcagtccgatatcggagaaagtaccgtttgaccac

SEQ ID NO: 14806 - DNA, 24 bp, Human herpesvirus 5
cgttcagtccgatatcggagaaag

SEQ ID NO: 14807 - DNA, 24 bp, Human herpesvirus 5
agttgcttcgagttgtgaattaga

SEQ ID NO: 14808 - DNA, 19 bp, Homo sapiens
gttcgatccttggagaaag

SEQ ID NO: 14809 - DNA, 18 bp, Homo sapiens
gttgcttcagttttctag

SEQ ID NO: 14810 - DNA, 66 bp, Human herpesvirus 5
gcgttccgttgagagtgactgtattcacccttatgtccaagttcactgactcttgataagagctgc

SEQ ID NO: 14811 - DNA, 24 bp, Human herpesvirus 5
tccaagttcactgactcttgataa

SEQ ID NO: 14812 - DNA, 24 bp, Human herpesvirus 5
tgagagtgactgtattcaccctta

SEQ ID NO: 14813 - DNA, 18 bp, Homo sapiens
aagttcactggtatttga

SEQ ID NO: 14814 - DNA, 22 bp, Homo sapiens
tccaagtttgctcaagtcgata

SEQ ID NO: 14815 - DNA, 21 bp, Homo sapiens
tccaagttcatggttcactcc

SEQ ID NO: 14816 - DNA, 18 bp, Homo sapiens
gttcactgaagccagtga

SEQ ID NO: 14817 - DNA, 16 bp, Homo sapiens
tccaaattctcttgat

SEQ ID NO: 14818 - DNA, 18 bp, Homo sapiens
catagtttgctcttgata

SEQ ID NO: 14819 - DNA, 20 bp, Homo sapiens
tctcagttcactaatttgat

SEQ ID NO: 14820 - DNA, 15 bp, Homo sapiens
gttcactcctgataa

SEQ ID NO: 14821 - DNA, 24 bp, Homo sapiens
tccaagtttagtattagcctcttg

SEQ ID NO: 14822 - DNA, 18 bp, Homo sapiens
cctgagttcactggctct

SEQ ID NO: 14823 - DNA, 21 bp, Homo sapiens
tgacagtgacctgccaccctt

SEQ ID NO: 14824 - DNA, 19 bp, Homo sapiens
tgagagtgatgttagattc

SEQ ID NO: 14825 - DNA, 20 bp, Homo sapiens
taagagtggcccctgccctt

SEQ ID NO: 14826 - DNA, 26 bp, Homo sapiens
tgagagtgggagctgggtttactctt

SEQ ID NO: 14827 - DNA, 24 bp, Homo sapiens
tgagagtgattttatcgagcattc

SEQ ID NO: 14828 - DNA, 18 bp, Homo sapiens
gagtgaccctcaccctta

SEQ ID NO: 14829 - DNA, 20 bp, Homo sapiens
gaggtggttaaacaccctta

SEQ ID NO: 14830 - DNA, 121 bp, Human herpesvirus 5
gatacatcgatgtggacaacaactgggccctctttataaataataagcgctgtctggatactgaattctcccatatgctaaaagttatggagtacggcctgccagttacagacgaagtatt

SEQ ID NO: 14831 - DNA, 24 bp, Human herpesvirus 5
ccatatgctaaaagttatggagta

SEQ ID NO: 14832 - DNA, 24 bp, Human herpesvirus 5
tacatcgatgtggacaacaactgg

SEQ ID NO: 14833 - DNA, 21 bp, Homo sapiens
ccatatgctacaggaaggggt

SEQ ID NO: 14834 - DNA, 19 bp, Homo sapiens
ccaaatgctaagagcaagt

SEQ ID NO: 14835 - DNA, 18 bp, Homo sapiens
catgtgccaaaagttatg

SEQ ID NO: 14836 - DNA, 20 bp, Homo sapiens
ccatatgcaaaggcacaaag

SEQ ID NO: 14837 - DNA, 21 bp, Homo sapiens
cattaagatattaacaactgg

SEQ ID NO: 14838 - DNA, 16 bp, Homo sapiens
gatgtggacacctcgg

SEQ ID NO: 14839 - DNA, 66 bp, Human herpesvirus 5
tatgcttcctttaaacaggtgttggattctgatggctttttagaatctcacaccagggacaacata

SEQ ID NO: 14840 - DNA, 21 bp, Human herpesvirus 5
tctcacaccagggacaacata

SEQ ID NO: 14841 - DNA, 24 bp, Human herpesvirus 5
acaggtgttggattctgatggctt

SEQ ID NO: 14842 - DNA, 19 bp, Homo sapiens
tcccacaccaaaatggaca

SEQ ID NO: 14843 - DNA, 19 bp, Homo sapiens
tctttgccaggaacttcat

SEQ ID NO: 14844 - DNA, 20 bp, Homo sapiens
ctcttagcctggacaacata

SEQ ID NO: 14845 - DNA, 16 bp, Homo sapiens
cccacagggacagcat

SEQ ID NO: 14846 - DNA, 19 bp, Homo sapiens
tcctacaccagatgcacat

SEQ ID NO: 14847 - DNA, 19 bp, Homo sapiens
tcaacaattggacaacata

SEQ ID NO: 14848 - DNA, 20 bp, Homo sapiens
tcccattaaatgacaacata

SEQ ID NO: 14849 - DNA, 15 bp, Homo sapiens
cctcacacccaacat

SEQ ID NO: 14850 - DNA, 21 bp, Homo sapiens
tcctaaaagagggacaatata

SEQ ID NO: 14851 - DNA, 18 bp, Homo sapiens
tcccacgggggacaacat

SEQ ID NO: 14852 - DNA, 17 bp, Homo sapiens
ctcacatcaacaacata

SEQ ID NO: 14853 - DNA, 21 bp, Homo sapiens
tctcacacgggcttctccaac

SEQ ID NO: 14854 - DNA, 18 bp, Homo sapiens
acagtgcagggacagcat

SEQ ID NO: 14855 - DNA, 17 bp, Homo sapiens
cctcacacagacagcat

SEQ ID NO: 14856 - DNA, 19 bp, Homo sapiens
tcttatacacgacaacata

SEQ ID NO: 14857 - DNA, 19 bp, Homo sapiens
tcccacgccaggaaccaac

SEQ ID NO: 14858 - DNA, 19 bp, Homo sapiens
caggtgttggacttgacct

SEQ ID NO: 14859 - DNA, 19 bp, Homo sapiens
aggtgttagatgatggctt

SEQ ID NO: 14860 - DNA, 14 bp, Homo sapiens
agtgcttgatggct

SEQ ID NO: 14861 - DNA, 19 bp, Homo sapiens
atgtgagattctggtggct

SEQ ID NO: 14862 - DNA, 18 bp, Homo sapiens
acaggggttgcgatggct

SEQ ID NO: 14863 - DNA, 16 bp, Homo sapiens
agtgtctctgatggct

SEQ ID NO: 14864 - DNA, 69 bp, Human herpesvirus 5
agttggctttctacccctctttacagacaaggaaaggttccctgtatagtttgtgtgggatctccaact

SEQ ID NO: 14865 - DNA, 23 bp, Human herpesvirus 5
tagtttgtgtgggatctccaact

SEQ ID NO: 14866 - DNA, 24 bp, Human herpesvirus 5
tggctttctacccctctttacaga

SEQ ID NO: 14867 - DNA, 19 bp, Homo sapiens
gtttgtgtcagctctaact

SEQ ID NO: 14868 - DNA, 15 bp, Homo sapiens
gttttgtgccccaac

SEQ ID NO: 14869 - DNA, 21 bp, Homo sapiens
tttcttttctttctttacaga

SEQ ID NO: 14870 - DNA, 21 bp, Homo sapiens
tggctttctgccggcagcaga

SEQ ID NO: 14871 - DNA, 18 bp, Homo sapiens
tggctttcttccttttcc

SEQ ID NO: 14872 - DNA, 15 bp, Homo sapiens
tggctttctctctcc

SEQ ID NO: 14873 - DNA, 15 bp, Homo sapiens
tggctttcgcctctc

SEQ ID NO: 14874 - DNA, 22 bp, Homo sapiens
ggctttctgtcttccagacaga

SEQ ID NO: 14875 - DNA, 16 bp, Homo sapiens
tggctttctctccaca

SEQ ID NO: 14876 - DNA, 22 bp, Homo sapiens
tgtctttttattcctccccaga

SEQ ID NO: 14877 - DNA, 19 bp, Homo sapiens
gctttctatcctggtgcag

SEQ ID NO: 14878 - DNA, 19 bp, Homo sapiens
tggctttctgtaccttttt

SEQ ID NO: 14879 - DNA, 16 bp, Homo sapiens
gctttctatctttcaa

SEQ ID NO: 14880 - DNA, 20 bp, Homo sapiens
tggccttctgttcctccaca

SEQ ID NO: 14881 - DNA, 18 bp, Homo sapiens
tggctttcctgtctacag

SEQ ID NO: 14882 - DNA, 17 bp, Homo sapiens
tggcttcctatttcttt

SEQ ID NO: 14883 - DNA, 24 bp, Homo sapiens
tgactttctaccctcaggtgcaga

SEQ ID NO: 14884 - DNA, 23 bp, Homo sapiens
tagctttctgcctactatataga

SEQ ID NO: 14885 - DNA, 18 bp, Homo sapiens
ggctttctgcttctgcag

SEQ ID NO: 14886 - DNA, 21 bp, Homo sapiens
gctttctactggagatacaga

SEQ ID NO: 14887 - DNA, 21 bp, Homo sapiens
gctttctacctctaccacaga

SEQ ID NO: 14888 - DNA, 26 bp, Homo sapiens
tggacttgtcgcctcctctttgtaga

SEQ ID NO: 14889 - DNA, 15 bp, Homo sapiens
tgactcttctttaca

SEQ ID NO: 14890 - DNA, 97 bp, Human herpesvirus 5
tttacctgtccaattgtctgtgaggtctataatcagactttccaaaaatataaagaaaaagttaatcttacagaaattaccataatggactggttga

SEQ ID NO: 14891 - DNA, 24 bp, Human herpesvirus 5
tacctgtccaattgtctgtgaggt

SEQ ID NO: 14892 - DNA, 24 bp, Human herpesvirus 5
ttaatcttacagaaattaccataa

SEQ ID NO: 14893 - DNA, 18 bp, Homo sapiens
tgtccgtttctgtggggt

SEQ ID NO: 14894 - DNA, 19 bp, Homo sapiens
ctgtccatgaccatgaggt

SEQ ID NO: 14895 - DNA, 21 bp, Homo sapiens
cctgctggtgtcacttggggt

SEQ ID NO: 14896 - DNA, 21 bp, Homo sapiens
ttaatctcatgattaccataa

SEQ ID NO: 14897 - DNA, 19 bp, Homo sapiens
tctgccagaaattgtcata

SEQ ID NO: 14898 - DNA, 75 bp, Human herpesvirus 5
gtctcggtcagcgtgccataaacgaatattatatggtacgtcgaacattcgcttatcatggcatgctgaccgaac

SEQ ID NO: 14899 - DNA, 17 bp, Human herpesvirus 5
tggcatgctgaccgaac

SEQ ID NO: 14900 - DNA, 24 bp, Human herpesvirus 5
cagcgtgccataaacgaatattat

SEQ ID NO: 14901 - DNA, 18 bp, Homo sapiens
ggcgccgtcagaccgaac

SEQ ID NO: 14902 - DNA, 23 bp, Homo sapiens
cagcgtgcatatcattttattat

SEQ ID NO: 14903 - DNA, 65 bp, Human papillomavirus type 89
gggcacaatttcttgcacgtgtgcatataccaaagggtatacaggctatgcaaggtcatatgtcc

SEQ ID NO: 14904 - DNA, 24 bp, Human papillomavirus type 89
tatacaggctatgcaaggtcatat

SEQ ID NO: 14905 - DNA, 24 bp, Human papillomavirus type 89
tcttgcacgtgtgcatataccaaa

SEQ ID NO: 14906 - DNA, 25 bp, Homo sapiens
atataggctatgtacagaattatat

SEQ ID NO: 14907 - DNA, 19 bp, Homo sapiens
tgacaggctatgttcacat

SEQ ID NO: 14908 - DNA, 23 bp, Homo sapiens
tgacaggctagtgatcaggtcat

SEQ ID NO: 14909 - DNA, 18 bp, Homo sapiens
catacaggttgtgcacgt

SEQ ID NO: 14910 - DNA, 18 bp, Homo sapiens
tatacaggcagtgtaaga

SEQ ID NO: 14911 - DNA, 20 bp, Homo sapiens
tatacaggctgtgacagaat

SEQ ID NO: 14912 - DNA, 22 bp, Homo sapiens
tacacaggtgggtaggttatat

SEQ ID NO: 14913 - DNA, 19 bp, Homo sapiens
ctgcacgtgtgtgcgtcca

SEQ ID NO: 14914 - DNA, 21 bp, Homo sapiens
ctgcacgtgtgtgcatgtcca

SEQ ID NO: 14915 - DNA, 17 bp, Homo sapiens
acctatcatataccaaa

SEQ ID NO: 14916 - DNA, 17 bp, Homo sapiens
ccttgaccaatgcatat

SEQ ID NO: 14917 - DNA, 21 bp, Homo sapiens
tcttacatgtttaataccaaa

SEQ ID NO: 14918 - DNA, 62 bp, Human papillomavirus type 89
atgtttgtggagtgatatacttgtgctgcttatttgcttttggctttcgcatttgcctgcat

SEQ ID NO: 14919 - DNA, 24 bp, Human papillomavirus type 89
ggagtgatatacttgtgctgctta

SEQ ID NO: 14920 - DNA, 22 bp, Human papillomavirus type 89
tggctttcgcatttgcctgcat

SEQ ID NO: 14921 - DNA, 21 bp, Homo sapiens
gagcgtctgtttgtgctgctt

SEQ ID NO: 14922 - DNA, 17 bp, Homo sapiens
gggtaataaacactgct

SEQ ID NO: 14923 - DNA, 19 bp, Homo sapiens
ggtgtgctgaatgctgctt

SEQ ID NO: 14924 - DNA, 16 bp, Homo sapiens
tgacttttgacctgca

SEQ ID NO: 14925 - DNA, 16 bp, Homo sapiens
ggctgcttttgcctgc

SEQ ID NO: 14926 - DNA, 19 bp, Homo sapiens
tggcttccgcgtgtccgtg

SEQ ID NO: 14927 - DNA, 18 bp, Homo sapiens
tggctttcagccctttgc

SEQ ID NO: 14928 - DNA, 17 bp, Homo sapiens
tggctttcctattgctg

SEQ ID NO: 14929 - DNA, 17 bp, Homo sapiens
tggctttcatattactg

SEQ ID NO: 14930 - DNA, 18 bp, Homo sapiens
tgatttccgatttgcctg

SEQ ID NO: 14931 - DNA, 67 bp, Human papillomavirus type 89
acatggtggtatttgacagacatgatgttgggttactaggcatattgttgttacttattgctcttgt

SEQ ID NO: 14932 - DNA, 24 bp, Human papillomavirus type 89
tttgacagacatgatgttgggtta

SEQ ID NO: 14933 - DNA, 24 bp, Human papillomavirus type 89
catattgttgttacttattgctct

SEQ ID NO: 14934 - DNA, 20 bp, Homo sapiens
tttggcagacatgcatctta

SEQ ID NO: 14935 - DNA, 23 bp, Homo sapiens
tttggcagatacgaaaccaagtt

SEQ ID NO: 14936 - DNA, 16 bp, Homo sapiens
tgttttactattgctc

SEQ ID NO: 14937 - DNA, 18 bp, Homo sapiens
atattgttgtcattaacc

SEQ ID NO: 14938 - DNA, 17 bp, Homo sapiens
cataatgttgtcttgct

SEQ ID NO: 14939 - DNA, 66 bp, Human papillomavirus type 89
gcaagtgctactacttttcggagtcagagtccaattggagtgaagccgaaaaattttgtagacagc

SEQ ID NO: 14940 - DNA, 24 bp, Human papillomavirus type 89
agtgaagccgaaaaattttgtaga

SEQ ID NO: 14941 - DNA, 24 bp, Human papillomavirus type 89
aagtgctactacttttcggagtca

SEQ ID NO: 14942 - DNA, 21 bp, Homo sapiens
aggaaagaaaaattttgtaga

SEQ ID NO: 14943 - DNA, 22 bp, Homo sapiens
gtggagctgggagactcgcaga

SEQ ID NO: 14944 - DNA, 20 bp, Homo sapiens
agtgaagctgaacggggcag

SEQ ID NO: 14945 - DNA, 23 bp, Homo sapiens
agtgaagctagaagagatgtgga

SEQ ID NO: 14946 - DNA, 24 bp, Homo sapiens
agtggggccggtagccctcgtaga

SEQ ID NO: 14947 - DNA, 20 bp, Homo sapiens
agtgaaactgaaaacattag

SEQ ID NO: 14948 - DNA, 21 bp, Homo sapiens
agtgccactgtctgtcggggt

SEQ ID NO: 14949 - DNA, 21 bp, Homo sapiens
gtgctacttgttaggaggtca

SEQ ID NO: 14950 - DNA, 16 bp, Homo sapiens
aagtgctacactgagt

SEQ ID NO: 14951 - DNA, 16 bp, Homo sapiens
gtgctactcttggtgt

SEQ ID NO: 14952 - DNA, 91 bp, Southern cowpea mosaic virus
tttcaaataatatatgctaaaattagttcattaaaatttatagataactatgatatatctttaactaaagtagcatatgttactcatgaaa

SEQ ID NO: 14953 - DNA, 24 bp, Southern cowpea mosaic virus
taatatatgctaaaattagttcat

SEQ ID NO: 14954 - DNA, 24 bp, Southern cowpea mosaic virus
taaagtagcatatgttactcatga

SEQ ID NO: 14955 - DNA, 18 bp, Homo sapiens
tatgctccaatagttcat

SEQ ID NO: 14956 - DNA, 21 bp, Homo sapiens
taatattgctagacagttcat

SEQ ID NO: 14957 - DNA, 20 bp, Homo sapiens
atatatgctgagaagttcac

SEQ ID NO: 14958 - DNA, 17 bp, Homo sapiens
aaagtggcacactcatg

SEQ ID NO: 14959 - DNA, 18 bp, Homo sapiens
taaagtagcgtgtccatg

SEQ ID NO: 14960 - DNA, 16 bp, Homo sapiens
agtgcttttactcatg

SEQ ID NO: 14961 - DNA, 23 bp, Homo sapiens
taaagtagcatgtttcttccatg

SEQ ID NO: 14962 - DNA, 18 bp, Homo sapiens
gcagcggcatactcatga

SEQ ID NO: 14963 - DNA, 103 bp, Southern cowpea mosaic virus
ctcctccactaattcgcggatacgttgccttatggctgagcttattggttccccatggtgcatcgccatgggtgacgactccgtggagggttttgtggagggg

SEQ ID NO: 14964 - DNA, 24 bp, Southern cowpea mosaic virus
gtgcatcgccatgggtgacgactc

SEQ ID NO: 14965 - DNA, 24 bp, Southern cowpea mosaic virus
taattcgcggatacgttgccttat

SEQ ID NO: 14966 - DNA, 19 bp, Homo sapiens
gtgcatctgccataatgac

SEQ ID NO: 14967 - DNA, 21 bp, Homo sapiens
taattctggcatttgccttat

SEQ ID NO: 14968 - DNA, 16 bp, Homo sapiens
taattcgcgcatcctt

SEQ ID NO: 14969 - DNA, 60 bp, Southern cowpea mosaic virus
tgaccccgcccctcggactttgaccgttcccacgccacgtcattttcccacgcgacgtca

SEQ ID NO: 14970 - DNA, 24 bp, Southern cowpea mosaic virus
cctcggactttgaccgttcccacg

SEQ ID NO: 14971 - DNA, 22 bp, Southern cowpea mosaic virus
gtcattttcccacgcgacgtca

SEQ ID NO: 14972 - DNA, 21 bp, Homo sapiens
tcggactttaccactgctacg

SEQ ID NO: 14973 - DNA, 15 bp, Homo sapiens
aaccccgttcccacg

SEQ ID NO: 14974 - DNA, 15 bp, Homo sapiens
cctggacctcgcgtt

SEQ ID NO: 14975 - DNA, 81 bp, Southern cowpea mosaic virus
aataatatagatagcagattacttaaaatatttataaaaaataaaacttttatttctggtagttttgtatcatatatgatt

SEQ ID NO: 14976 - DNA, 24 bp, Southern cowpea mosaic virus
taatatagatagcagattacttaa

SEQ ID NO: 14977 - DNA, 24 bp, Southern cowpea mosaic virus
tggtagttttgtatcatatatgat

SEQ ID NO: 14978 - DNA, 18 bp, Homo sapiens
gatttaaacagattactt

SEQ ID NO: 14979 - DNA, 22 bp, Homo sapiens
taatagaggcagcaattactta

SEQ ID NO: 14980 - DNA, 18 bp, Homo sapiens
taacatagatagtaacca

SEQ ID NO: 14981 - DNA, 20 bp, Homo sapiens
atatagatagatatacttaa

SEQ ID NO: 14982 - DNA, 62 bp, Southern cowpea mosaic virus
gcgctcatgtcgctgggagtacacccggacccgggcctggatgtactccagcacctgatcgc

SEQ ID NO: 14983 - DNA, 24 bp, Southern cowpea mosaic virus
tcgctgggagtacacccggacccg

SEQ ID NO: 14984 - DNA, 19 bp, Southern cowpea mosaic virus
tactccagcacctgatcgc

SEQ ID NO: 14985 - DNA, 19 bp, Homo sapiens
gctgggagtgcactacaga

SEQ ID NO: 14986 - DNA, 18 bp, Homo sapiens
tcgccggggtccgggccc

SEQ ID NO: 14987 - DNA, 18 bp, Homo sapiens
cctggaggacccggaccc

SEQ ID NO: 14988 - DNA, 21 bp, Homo sapiens
tcgctgggagcgcgcgctccg

SEQ ID NO: 14989 - DNA, 23 bp, Homo sapiens
tcgctggggggcaggggaggacc

SEQ ID NO: 14990 - DNA, 17 bp, Homo sapiens
gctgggaggcacctgcg

SEQ ID NO: 14991 - DNA, 17 bp, Homo sapiens
tcgctgggagtgcccag

SEQ ID NO: 14992 - DNA, 22 bp, Homo sapiens
gctgggagggcaggacagggcc

SEQ ID NO: 14993 - DNA, 91 bp, Southern cowpea mosaic virus
attgataattatatgagtgaatttaatgataacacatcacatcctgaatttaatatagttaaagttgctcaaaaacgtgtaatatatcaat

SEQ ID NO: 14994 - DNA, 24 bp, Southern cowpea mosaic virus
tgagtgaatttaatgataacacat

SEQ ID NO: 14995 - DNA, 24 bp, Southern cowpea mosaic virus
taaagttgctcaaaaacgtgtaat

SEQ ID NO: 14996 - DNA, 22 bp, Homo sapiens
taagtgaataaaaatagcacat

SEQ ID NO: 14997 - DNA, 90 bp, Tupaia herpesvirus
cgcattaataatttacccacagtgaagcttgctaagcaggctctacccctgcttgcgaatcctaaacttgtaaataaagctatagatgtg

SEQ ID NO: 14998 - DNA, 24 bp, Tupaia herpesvirus
cttgcgaatcctaaacttgtaaat

SEQ ID NO: 14999 - DNA, 24 bp, Tupaia herpesvirus
cacagtgaagcttgctaagcaggc

SEQ ID NO: 15000 - DNA, 21 bp, Homo sapiens
acagtgaagtctgcatgtggc

SEQ ID NO: 15001 - DNA, 20 bp, Homo sapiens
gcgaggacaaagaagcaggc

SEQ ID NO: 15002 - DNA, 18 bp, Homo sapiens
gtgaagctgggaagcagg

SEQ ID NO: 15003 - DNA, 16 bp, Homo sapiens
cacatgaagccagcag

SEQ ID NO: 15004 - DNA, 18 bp, Homo sapiens
atagagggtctaagcagg

SEQ ID NO: 15005 - DNA, 21 bp, Homo sapiens
acagtgaagcctgccaccagg

SEQ ID NO: 15006 - DNA, 16 bp, Homo sapiens
cacagtgagtctgcag

SEQ ID NO: 15007 - DNA, 20 bp, Homo sapiens
agagagcttgctgggtgggc

SEQ ID NO: 15008 - DNA, 20 bp, Homo sapiens
cagtgaagtgggaggcaggc

SEQ ID NO: 15009 - DNA, 14 bp, Homo sapiens
aggaagcaagcagg

SEQ ID NO: 15010 - DNA, 21 bp, Homo sapiens
cagtgaagggactgggcaggc

SEQ ID NO: 15011 - DNA, 21 bp, Homo sapiens
atgaagcttgaatgaagcagg

SEQ ID NO: 15012 - DNA, 24 bp, Homo sapiens
acagtaaagctgtagatggtgggc

SEQ ID NO: 15013 - DNA, 16 bp, Homo sapiens
agtgggcttaagcagg

SEQ ID NO: 15014 - DNA, 22 bp, Homo sapiens
cagtgaagctccaggagcaggc

SEQ ID NO: 15015 - DNA, 15 bp, Homo sapiens
tgagtgagtaagcag

SEQ ID NO: 15016 - DNA, 19 bp, Homo sapiens
cagaggggaagaagcaggc

SEQ ID NO: 15017 - DNA, 65 bp, Tupaia herpesvirus
ccgccgtctcgtagaccgaatccagacgacgcagcccgtctttgatgaggacgtcgaaattgtgg

SEQ ID NO: 15018 - DNA, 24 bp, Tupaia herpesvirus
tttgatgaggacgtcgaaattgtg

SEQ ID NO: 15019 - DNA, 24 bp, Tupaia herpesvirus
tctcgtagaccgaatccagacgac

SEQ ID NO: 15020 - DNA, 22 bp, Homo sapiens
tttggctgggactgaaattgtg

SEQ ID NO: 15021 - DNA, 68 bp, Tupaia herpesvirus
caaaccgggtgcaatatcagctcctgtcgctattagtcggcgagtggctggtatgaagcctaggtttg

SEQ ID NO: 15022 - DNA, 20 bp, Tupaia herpesvirus
tggtatgaagcctaggtttg

SEQ ID NO: 15023 - DNA, 24 bp, Tupaia herpesvirus
accgggtgcaatatcagctcctgt

SEQ ID NO: 15024 - DNA, 18 bp, Homo sapiens
ggctcgagtttaggtttg

SEQ ID NO: 15025 - DNA, 17 bp, Homo sapiens
tggggtgaataggtttg

SEQ ID NO: 15026 - DNA, 20 bp, Homo sapiens
tggtatagacgccaggtttg

SEQ ID NO: 15027 - DNA, 17 bp, Homo sapiens
tggatgaagcagatttg

SEQ ID NO: 15028 - DNA, 19 bp, Homo sapiens
tggtatgagtccattcctg

SEQ ID NO: 15029 - DNA, 19 bp, Homo sapiens
tggtgtggggccagacttg

SEQ ID NO: 15030 - DNA, 19 bp, Homo sapiens
tgatatgcctgcaggtttg

SEQ ID NO: 15031 - DNA, 21 bp, Homo sapiens
tggtatgaaagggattgtttg

SEQ ID NO: 15032 - DNA, 19 bp, Homo sapiens
tggtatgaaggccattctg

SEQ ID NO: 15033 - DNA, 16 bp, Homo sapiens
ggtatgaagaactttg

SEQ ID NO: 15034 - DNA, 17 bp, Homo sapiens
ggtatgaaggggatttg

SEQ ID NO: 15035 - DNA, 19 bp, Homo sapiens
tggtatgaaaagaagtttg

SEQ ID NO: 15036 - DNA, 24 bp, Homo sapiens
ccgggtgcggtggctcacacctgt

SEQ ID NO: 15037 - DNA, 22 bp, Homo sapiens
gggtgtggtggcgagctcctgt

SEQ ID NO: 15038 - DNA, 21 bp, Homo sapiens
gggctgcatacaggctcctgt

SEQ ID NO: 15039 - DNA, 22 bp, Homo sapiens
gggtgcaatggctgacacctgt

SEQ ID NO: 15040 - DNA, 17 bp, Homo sapiens
accgggtgcatgtcgcc

SEQ ID NO: 15041 - DNA, 24 bp, Homo sapiens
ccgggtgcagtggctcacacctgt

SEQ ID NO: 15042 - DNA, 71 bp, Tupaia herpesvirus
gtaacggggatcgcgagcggtcgagtcgggaccctgcaggcgaccgaacggcagcagatcttccccgcaac

SEQ ID NO: 15043 - DNA, 24 bp, Tupaia herpesvirus
acggggatcgcgagcggtcgagtc

SEQ ID NO: 15044 - DNA, 24 bp, Tupaia herpesvirus
cgaccgaacggcagcagatcttcc

SEQ ID NO: 15045 - DNA, 22 bp, Homo sapiens
acgaggattgtgggcttcgagt

SEQ ID NO: 15046 - DNA, 22 bp, Homo sapiens
cgcggccggcagcggtcgggtc

SEQ ID NO: 15047 - DNA, 23 bp, Homo sapiens
cgatcggaatcgtgggatcttcc

SEQ ID NO: 15048 - DNA, 22 bp, Homo sapiens
cctgagcttcgccagatcttcc

SEQ ID NO: 15049 - DNA, 15 bp, Homo sapiens
gagggccagatcttc

SEQ ID NO: 15050 - DNA, 19 bp, Homo sapiens
gacccactggcagatcttc

SEQ ID NO: 15051 - DNA, 16 bp, Homo sapiens
cggtcgggcagatctt

SEQ ID NO: 15052 - DNA, 16 bp, Homo sapiens
ccttgcagcagatctt

SEQ ID NO: 15053 - DNA, 17 bp, Homo sapiens
gactgagccagatcttc

SEQ ID NO: 15054 - DNA, 21 bp, Homo sapiens
caaccattccagcagattttc

SEQ ID NO: 15055 - DNA, 19 bp, Homo sapiens
ccaacggcagtccggctcc

SEQ ID NO: 15056 - DNA, 124 bp, Tupaia herpesvirus
agggtgtcaattacattgctgatcgtgatgtgataactactgggggtaatattggtgttaacatcaatattcccgggacttatctcgtcacgattgttcttaatgctacatcgattggtcccct

SEQ ID NO: 15057 - DNA, 24 bp, Tupaia herpesvirus
ttcccgggacttatctcgtcacga

SEQ ID NO: 15058 - DNA, 24 bp, Tupaia herpesvirus
tgtcaattacattgctgatcgtga

SEQ ID NO: 15059 - DNA, 16 bp, Homo sapiens
ttcccgggacttctgc

SEQ ID NO: 15060 - DNA, 17 bp, Homo sapiens
ttctggagcttatcccg

SEQ ID NO: 15061 - DNA, 20 bp, Homo sapiens
tcccgggatttatctcagcc

SEQ ID NO: 15062 - DNA, 22 bp, Homo sapiens
tgtcaattttattgctttttga

SEQ ID NO: 15063 - DNA, 22 bp, Homo sapiens
tgttaactacatgcgcattgtg

SEQ ID NO: 15064 - DNA, 74 bp, Tupaia herpesvirus
cgtgctgccattagctcttatgctcattccgctgattcagcgccttgggctgagaatgttctagtggtcccatg

SEQ ID NO: 15065 - DNA, 24 bp, Tupaia herpesvirus
tgccattagctcttatgctcattc

SEQ ID NO: 15066 - DNA, 24 bp, Tupaia herpesvirus
tgagaatgttctagtggtcccatg

SEQ ID NO: 15067 - DNA, 23 bp, Homo sapiens
tgccttagccctgcatgctcatt

SEQ ID NO: 15068 - DNA, 20 bp, Homo sapiens
tgacattagctcttaatact

SEQ ID NO: 15069 - DNA, 17 bp, Homo sapiens
tggaatgttctatttgt

SEQ ID NO: 15070 - DNA, 19 bp, Homo sapiens
aaggatgttgggtcccatg

SEQ ID NO: 15071 - DNA, 21 bp, Homo sapiens
tgaggatttaaatgtcccatg

SEQ ID NO: 15072 - DNA, 17 bp, Homo sapiens
gagcttggtggtcccat

SEQ ID NO: 15073 - DNA, 80 bp, Tupaia herpesvirus
ggtgagcggacgaacagatagccgcgcgcacacgcgagtctcccggtgagcgagcgactgtctcgagtcgcacgcacacc

SEQ ID NO: 15074 - DNA, 24 bp, Tupaia herpesvirus
tgagcgagcgactgtctcgagtcg

SEQ ID NO: 15075 - DNA, 24 bp, Tupaia herpesvirus
acgaacagatagccgcgcgcacac

SEQ ID NO: 15076 - DNA, 23 bp, Homo sapiens
gagcgagcgtcaccctcgagtcg

SEQ ID NO: 15077 - DNA, 19 bp, Homo sapiens
cgggccgctgtctcgagtc

SEQ ID NO: 15078 - DNA, 18 bp, Homo sapiens
acgaacaggtgcccggca

SEQ ID NO: 15079 - DNA, 17 bp, Homo sapiens
aacagatgcatgcacac

SEQ ID NO: 15080 - DNA, 22 bp, Homo sapiens
gaacagatagtctgctaggcac

SEQ ID NO: 15081 - DNA, 19 bp, Homo sapiens
cgagggcaggtgcgcgcgc

SEQ ID NO: 15082 - DNA, 21 bp, Homo sapiens
cgaacagacaggtgtggcaca

SEQ ID NO: 15083 - DNA, 19 bp, Homo sapiens
gatggatagccacaaagca

SEQ ID NO: 15084 - DNA, 22 bp, Homo sapiens
acgaacaggcaagcacgtacac

SEQ ID NO: 15085 - DNA, 21 bp, Homo sapiens
acggggagggggcgcgcacgc

SEQ ID NO: 15086 - DNA, 23 bp, Homo sapiens
acaaacagccagagcgtgcgcac

SEQ ID NO: 15087 - DNA, 18 bp, Homo sapiens
gatgcagagtgcgcacac

SEQ ID NO: 15088 - DNA, 18 bp, Homo sapiens
cggcagggagacgcgcac

SEQ ID NO: 15089 - DNA, 20 bp, Homo sapiens
acgagtacacacgcgcgcgc

SEQ ID NO: 15090 - DNA, 131 bp, Tupaia herpesvirus
ttttgttaataaagtatgtatggaggtttcatttgtggttgcaccctgtgactaaggtgttgtccctgttttacatataataggagtgtgattaccaacatttcctacataattttatgccctaccctaag

SEQ ID NO: 15091 - DNA, 24 bp, Tupaia herpesvirus
taaagtatgtatggaggtttcatt

SEQ ID NO: 15092 - DNA, 24 bp, Tupaia herpesvirus
atataataggagtgtgattaccaa

SEQ ID NO: 15093 - DNA, 21 bp, Homo sapiens
gtatgtattcacattttcatt

SEQ ID NO: 15094 - DNA, 20 bp, Homo sapiens
gtgtgtgtgggggtttcatt

SEQ ID NO: 15095 - DNA, 21 bp, Homo sapiens
taaggtatgtatgaccttgtt

SEQ ID NO: 15096 - DNA, 20 bp, Homo sapiens
aaagtatgtgtgtgaacttt

SEQ ID NO: 15097 - DNA, 20 bp, Homo sapiens
ataggataggagtttccacc

SEQ ID NO: 15098 - DNA, 18 bp, Homo sapiens
atataatagaggtgtaac

SEQ ID NO: 15099 - DNA, 22 bp, Homo sapiens
atatgaaggactaaattaccaa

SEQ ID NO: 15100 - DNA, 18 bp, Homo sapiens
acataataggatttacta

SEQ ID NO: 15101 - DNA, 18 bp, Homo sapiens
taataggagtagtgttta

SEQ ID NO: 15102 - DNA, 19 bp, Homo sapiens
taataagagttgaggacca

SEQ ID NO: 15103 - DNA, 101 bp, Equine herpesvirus 2
gaggtgcttgcatggagccatctctattggataaacagcaaaggtgaattggcattttcccctctttttatcaaaagatggagaggcctgtaaagtccttc

SEQ ID NO: 15104 - DNA, 24 bp, Equine herpesvirus 2
tattggataaacagcaaaggtgaa

SEQ ID NO: 15105 - DNA, 23 bp, Equine herpesvirus 2
tggagaggcctgtaaagtccttc

SEQ ID NO: 15106 - DNA, 21 bp, Homo sapiens
tactggatctactcaagggtg

SEQ ID NO: 15107 - DNA, 19 bp, Homo sapiens
tattggataaatacatgca

SEQ ID NO: 15108 - DNA, 17 bp, Homo sapiens
ttggaaggcaaaggtga

SEQ ID NO: 15109 - DNA, 22 bp, Homo sapiens
tattggatagcacagccctaga

SEQ ID NO: 15110 - DNA, 23 bp, Homo sapiens
ttggataaggcaggctctatgaa

SEQ ID NO: 15111 - DNA, 27 bp, Homo sapiens
tgaagaggtctgcaggtgaagttcttc

SEQ ID NO: 15112 - DNA, 19 bp, Homo sapiens
tgggggggcctgctaaatc

SEQ ID NO: 15113 - DNA, 16 bp, Homo sapiens
ggagagaaaagtcctt

SEQ ID NO: 15114 - DNA, 18 bp, Homo sapiens
gatttctgtaaagttctt

SEQ ID NO: 15115 - DNA, 21 bp, Homo sapiens
tggagaggcttgcaaggtccc

SEQ ID NO: 15116 - DNA, 19 bp, Homo sapiens
gggggggcttgtaaacgtc

SEQ ID NO: 15117 - DNA, 20 bp, Homo sapiens
tggagaggctgtggagtccc

SEQ ID NO: 15118 - DNA, 21 bp, Homo sapiens
tggggcacagtggagtccttc

SEQ ID NO: 15119 - DNA, 19 bp, Homo sapiens
tggggaggcctggagcctt

SEQ ID NO: 15120 - DNA, 19 bp, Homo sapiens
ggagggcacagggtccttc

SEQ ID NO: 15121 - DNA, 20 bp, Homo sapiens
tggagagacgcaaagttctt

SEQ ID NO: 15122 - DNA, 22 bp, Homo sapiens
tggggggtcgcaccagtccttc

SEQ ID NO: 15123 - DNA, 25 bp, Homo sapiens
tggagagagaggaagaaagtttttc

SEQ ID NO: 15124 - DNA, 20 bp, Homo sapiens
tggggaggcctaagtttttc

SEQ ID NO: 15125 - DNA, 18 bp, Homo sapiens
tggggaggcctggtaagt

SEQ ID NO: 15126 - DNA, 19 bp, Homo sapiens
tggagaagtttgtaagttc

SEQ ID NO: 15127 - DNA, 20 bp, Homo sapiens
tggtgaggtgggagtccttc

SEQ ID NO: 15128 - DNA, 64 bp, Equine herpesvirus 2
ttcacatggttgtgaatcttggcacaggccttaaagttttccacgttcagagccatacagtggg

SEQ ID NO: 15129 - DNA, 24 bp, Equine herpesvirus 2
tgtgaatcttggcacaggccttaa

SEQ ID NO: 15130 - DNA, 24 bp, Equine herpesvirus 2
tccacgttcagagccatacagtgg

SEQ ID NO: 15131 - DNA, 24 bp, Homo sapiens
gtgaaataagagtgcaggccttaa

SEQ ID NO: 15132 - DNA, 22 bp, Homo sapiens
tgcgaatctactaggggtctta

SEQ ID NO: 15133 - DNA, 16 bp, Homo sapiens
tgaatcttggagtctc

SEQ ID NO: 15134 - DNA, 18 bp, Homo sapiens
tgtcagtcttggcacaag

SEQ ID NO: 15135 - DNA, 15 bp, Homo sapiens
tgtgagccaggcctt

SEQ ID NO: 15136 - DNA, 20 bp, Homo sapiens
gtttataaatcatacagtgg

SEQ ID NO: 15137 - DNA, 22 bp, Homo sapiens
tccctgtggatctatacagtgg

SEQ ID NO: 15138 - DNA, 18 bp, Homo sapiens
ccacgtcctcatatggtg

SEQ ID NO: 15139 - DNA, 22 bp, Homo sapiens
tccacgctcggggctaccttgg

SEQ ID NO: 15140 - DNA, 26 bp, Homo sapiens
tccacgttcagacttggccactgtat

SEQ ID NO: 15141 - DNA, 21 bp, Homo sapiens
tccgcgctcggtccgcggtgg

SEQ ID NO: 15142 - DNA, 22 bp, Homo sapiens
tccaagtttctgcatgcagtgg

SEQ ID NO: 15143 - DNA, 87 bp, Equine herpesvirus 2
gcacgtccgcgggcgcgtaggccagcacctgagccagcaggtcaaagtgctcgccggccagcagcgtgcgcgccagcgcgggcatgt

SEQ ID NO: 15144 - DNA, 24 bp, Equine herpesvirus 2
gcgcgtaggccagcacctgagcca

SEQ ID NO: 15145 - DNA, 24 bp, Equine herpesvirus 2
ccagcagcgtgcgcgccagcgcgg

SEQ ID NO: 15146 - DNA, 23 bp, Homo sapiens
gcgcgtggtatcggcctgagcca

SEQ ID NO: 15147 - DNA, 16 bp, Homo sapiens
gctgtgggccagcagc

SEQ ID NO: 15148 - DNA, 17 bp, Homo sapiens
gcgcgaggccagcgagc

SEQ ID NO: 15149 - DNA, 21 bp, Homo sapiens
gcgctgggcagcgcctgagcc

SEQ ID NO: 15150 - DNA, 22 bp, Homo sapiens
ggcaaggtcagcacctgggcca

SEQ ID NO: 15151 - DNA, 15 bp, Homo sapiens
gtaggctagcacacc

SEQ ID NO: 15152 - DNA, 19 bp, Homo sapiens
cagagctggcacctgagcc

SEQ ID NO: 15153 - DNA, 19 bp, Homo sapiens
gcagcgtgggtcctgagcc

SEQ ID NO: 15154 - DNA, 25 bp, Homo sapiens
ccagcagctgccctgtccagtgtgg

SEQ ID NO: 15155 - DNA, 24 bp, Homo sapiens
ccggcaggtgcgcgcccgagccgg

SEQ ID NO: 15156 - DNA, 18 bp, Homo sapiens
ccagcacggccagcgtgg

SEQ ID NO: 15157 - DNA, 18 bp, Homo sapiens
gcagcacagccggcgcgg

SEQ ID NO: 15158 - DNA, 19 bp, Homo sapiens
gcggcgggtggcagcgcgg

SEQ ID NO: 15159 - DNA, 18 bp, Homo sapiens
gcgggcgtcctggcgcgg

SEQ ID NO: 15160 - DNA, 14 bp, Homo sapiens
cagcggccagcgcg

SEQ ID NO: 15161 - DNA, 18 bp, Homo sapiens
gcagtggctccagcgcgg

SEQ ID NO: 15162 - DNA, 77 bp, Cowpox virus
ctcaaattacttcagagctttcattttaaaaaattacatcctcttcctgtgtaatgtttgagtgctgaatttttgag

SEQ ID NO: 15163 - DNA, 24 bp, Cowpox virus
tacttcagagctttcattttaaaa

SEQ ID NO: 15164 - DNA, 24 bp, Cowpox virus
taatgtttgagtgctgaatttttg

SEQ ID NO: 15165 - DNA, 22 bp, Homo sapiens
tacttcaaagttgtctttaaaa

SEQ ID NO: 15166 - DNA, 19 bp, Homo sapiens
ctttagagctctcatccca

SEQ ID NO: 15167 - DNA, 17 bp, Homo sapiens
ttcagaactgtatttta

SEQ ID NO: 15168 - DNA, 22 bp, Homo sapiens
tacttcagagacttttatttta

SEQ ID NO: 15169 - DNA, 19 bp, Homo sapiens
ttcatcagctttcatttta

SEQ ID NO: 15170 - DNA, 20 bp, Homo sapiens
ctttagaactttcaatttta

SEQ ID NO: 15171 - DNA, 19 bp, Homo sapiens
cttcagagttttttccaaa

SEQ ID NO: 15172 - DNA, 18 bp, Homo sapiens
ctctagaactcattttaa

SEQ ID NO: 15173 - DNA, 17 bp, Homo sapiens
gtctgagttgaattttt

SEQ ID NO: 15174 - DNA, 23 bp, Homo sapiens
taatatttggctgctggtttttg

SEQ ID NO: 15175 - DNA, 22 bp, Homo sapiens
tgatttcagggctgaatttttg

SEQ ID NO: 15176 - DNA, 19 bp, Homo sapiens
tgtttgggtgctatttttg

SEQ ID NO: 15177 - DNA, 78 bp, Cowpox virus
ccagagccttcaaaaattgctgagtgcttctgaaactgagaagctccaactgtatgaacctgaagagtaactctctgg

SEQ ID NO: 15178 - DNA, 24 bp, Cowpox virus
caactgtatgaacctgaagagtaa

SEQ ID NO: 15179 - DNA, 24 bp, Cowpox virus
gagccttcaaaaattgctgagtgc

SEQ ID NO: 15180 - DNA, 17 bp, Homo sapiens
gtgtaaaatgaagagta

SEQ ID NO: 15181 - DNA, 18 bp, Homo sapiens
aactgtactgggaagggt

SEQ ID NO: 15182 - DNA, 21 bp, Homo sapiens
caactgtatggtttggggaag

SEQ ID NO: 15183 - DNA, 17 bp, Homo sapiens
actgtgtatgaagagta

SEQ ID NO: 15184 - DNA, 22 bp, Homo sapiens
cagccaatctaacttgaagagt

SEQ ID NO: 15185 - DNA, 14 bp, Homo sapiens
tatatggaagagta

SEQ ID NO: 15186 - DNA, 22 bp, Homo sapiens
gagccctcagagccgtgagtgc

SEQ ID NO: 15187 - DNA, 20 bp, Homo sapiens
gagtctccttctgctgagtg

SEQ ID NO: 15188 - DNA, 18 bp, Homo sapiens
gagccttcaaaagttgtg

SEQ ID NO: 15189 - DNA, 23 bp, Homo sapiens
gagcctccgaaggctgcaagtgc

SEQ ID NO: 15190 - DNA, 18 bp, Homo sapiens
gagccttcgggagctgag

SEQ ID NO: 15191 - DNA, 18 bp, Homo sapiens
gagcctccagaaggagtg

SEQ ID NO: 15192 - DNA, 65 bp, Cowpox virus
acagtagttttcacggtattttttgaaattaaattttaaatcgggtacatgataaagcatgctgt

SEQ ID NO: 15193 - DNA, 24 bp, Cowpox virus
ttaaatcgggtacatgataaagca

SEQ ID NO: 15194 - DNA, 24 bp, Cowpox virus
agtagttttcacggtattttttga

SEQ ID NO: 15195 - DNA, 16 bp, Homo sapiens
atcggctgataaagca

SEQ ID NO: 15196 - DNA, 18 bp, Homo sapiens
gggccacatgatggggca

SEQ ID NO: 15197 - DNA, 18 bp, Homo sapiens
ttaaatttggtacaaagc

SEQ ID NO: 15198 - DNA, 20 bp, Homo sapiens
agtagtttgcataatatttt

SEQ ID NO: 15199 - DNA, 18 bp, Homo sapiens
agagttttcactcatttt

SEQ ID NO: 15200 - DNA, 75 bp, Cowpox virus
tcgtcgtccacctcaggtacaatagtatattatatatatattattttaataaacttattgaggacgggagaacga

SEQ ID NO: 15201 - DNA, 24 bp, Cowpox virus
tattattttaataaacttattgag

SEQ ID NO: 15202 - DNA, 24 bp, Cowpox virus
tccacctcaggtacaatagtatat

SEQ ID NO: 15203 - DNA, 19 bp, Homo sapiens
ttacttaaaacttattgag

SEQ ID NO: 15204 - DNA, 21 bp, Homo sapiens
ttaagaaataaacttattgag

SEQ ID NO: 15205 - DNA, 19 bp, Homo sapiens
tccctctcaaatagtatat

SEQ ID NO: 15206 - DNA, 19 bp, Homo sapiens
accctgttacatagtatat

SEQ ID NO: 15207 - DNA, 21 bp, Homo sapiens
tctgcctcaggtctctggtat

SEQ ID NO: 15208 - DNA, 16 bp, Homo sapiens
tcaggccacagtatat

SEQ ID NO: 15209 - DNA, 19 bp, Homo sapiens
caccttaggtacaaaatat

SEQ ID NO: 15210 - DNA, 65 bp, Cowpox virus
ttacaactttcattttaaaagtcgcgtcttcttccggtagcgtcttattaaagtttaagttgtag

SEQ ID NO: 15211 - DNA, 24 bp, Cowpox virus
tagcgtcttattaaagtttaagtt

SEQ ID NO: 15212 - DNA, 24 bp, Cowpox virus
actttcattttaaaagtcgcgtct

SEQ ID NO: 15213 - DNA, 21 bp, Homo sapiens
taccgtcttgaaatttaagtt

SEQ ID NO: 15214 - DNA, 18 bp, Homo sapiens
cttttgttctaaaagtca

SEQ ID NO: 15215 - DNA, 18 bp, Homo sapiens
tttcattttaaaagatac

SEQ ID NO: 15216 - DNA, 19 bp, Homo sapiens
actttcatttcaagatatc

SEQ ID NO: 15217 - DNA, 19 bp, Homo sapiens
acttccattttaaaagaca

SEQ ID NO: 15218 - DNA, 20 bp, Homo sapiens
tttcattttaaaaatgatct

SEQ ID NO: 15219 - DNA, 18 bp, Homo sapiens
acattcattttaaaactc

SEQ ID NO: 15220 - DNA, 82 bp, Cowpox virus
aaaattatgtgtaagcctagcgtgagtgcgcacagtcagattcttgcattgtgtttactttatttagcaataacatcttttt

SEQ ID NO: 15221 - DNA, 24 bp, Cowpox virus
cattgtgtttactttatttagcaa

SEQ ID NO: 15222 - DNA, 24 bp, Cowpox virus
tatgtgtaagcctagcgtgagtgc

SEQ ID NO: 15223 - DNA, 17 bp, Homo sapiens
ttgtgttattttcagca

SEQ ID NO: 15224 - DNA, 20 bp, Homo sapiens
attgttttactcctaagcaa

SEQ ID NO: 15225 - DNA, 20 bp, Homo sapiens
cattgtgtttcttacatgca

SEQ ID NO: 15226 - DNA, 19 bp, Homo sapiens
attgtagtttactcaatag

SEQ ID NO: 15227 - DNA, 20 bp, Homo sapiens
ttgtgtttctttttccctca

SEQ ID NO: 15228 - DNA, 16 bp, Homo sapiens
ttgtgttactttatgc

SEQ ID NO: 15229 - DNA, 24 bp, Homo sapiens
attgtgtctacctcccattggcaa

SEQ ID NO: 15230 - DNA, 22 bp, Homo sapiens
tgtgtcagtctttatttggcaa

SEQ ID NO: 15231 - DNA, 23 bp, Homo sapiens
tatgcaacaaattttatttagca

SEQ ID NO: 15232 - DNA, 22 bp, Homo sapiens
tatctgtaagcctatttgggtg

SEQ ID NO: 15233 - DNA, 23 bp, Homo sapiens
taatgctgtcctagcgtgagtgc

SEQ ID NO: 15234 - DNA, 22 bp, Homo sapiens
atgtgtaggaatcagtgagtgc

SEQ ID NO: 15235 - DNA, 62 bp, Satellite tobacco mosaic virus
atctctttcagtatgtgaatagataggtattttatctctattcatcatcgaatttaagagat

SEQ ID NO: 15236 - DNA, 24 bp, Rabbit fibroma virus
tatgtgaatagataggtattttat

SEQ ID NO: 15237 - DNA, 22 bp, Satellite tobacco mosaic virus
ttcatcatcgaatttaagagat

SEQ ID NO: 15238 - DNA, 18 bp, Homo sapiens
tatgtgaaaggtacctta

SEQ ID NO: 15239 - DNA, 22 bp, Homo sapiens
tatgttggtagaagtattttat

SEQ ID NO: 15240 - DNA, 72 bp, Satellite tobacco mosaic virus
gagctggaagctatcctaaggtcaatccgactccaacgtgggtcagagccatacctttcgaagtgtcagttc

SEQ ID NO: 15241 - DNA, 24 bp, Satellite tobacco mosaic virus
tatcctaaggtcaatccgactcca

SEQ ID NO: 15242 - DNA, 24 bp, Satellite tobacco mosaic virus
tcagagccatacctttcgaagtgt

SEQ ID NO: 15243 - DNA, 16 bp, Homo sapiens
cctaggtctcgactcc

SEQ ID NO: 15244 - DNA, 22 bp, Homo sapiens
cagagccatgctgtgcaagtgt

SEQ ID NO: 15245 - DNA, 17 bp, Homo sapiens
tcagagtctacctttca

SEQ ID NO: 15246 - DNA, 97 bp, Satellite tobacco mosaic virus
attttaggaactacgttcatggtatcctggcgaatattaaaactatcaatgatatgattatcgttttcatcttttatcaccatatagtttctaagat

SEQ ID NO: 15247 - DNA, 24 bp, Human adenovirus F
ttcatcttttatcaccatatagtt

SEQ ID NO: 15248 - DNA, 24 bp, Satellite tobacco mosaic virus
taggaactacgttcatggtatcct

SEQ ID NO: 15249 - DNA, 27 bp, Homo sapiens
ttcatctttatatggatgtatatagtt

SEQ ID NO: 15250 - DNA, 18 bp, Homo sapiens
ttcatcttttattacaat

SEQ ID NO: 15251 - DNA, 19 bp, Homo sapiens
ttcatcttttgttccccat

SEQ ID NO: 15252 - DNA, 16 bp, Homo sapiens
ttttatcaccagagtt

SEQ ID NO: 15253 - DNA, 18 bp, Homo sapiens
ttcatcttttatttttcc

SEQ ID NO: 15254 - DNA, 19 bp, Homo sapiens
ttcatcttttatttatagt

SEQ ID NO: 15255 - DNA, 23 bp, Homo sapiens
gggggcattatcattggtatcct

SEQ ID NO: 15256 - DNA, 19 bp, Homo sapiens
ggaactacattttgttcct

SEQ ID NO: 15257 - DNA, 70 bp, Satellite tobacco mosaic virus
tgggctacactgataggctgcccgttctgaaggggcacctgatttacaaaacagactttattgtgggcca

SEQ ID NO: 15258 - DNA, 24 bp, Satellite tobacco mosaic virus
cacctgatttacaaaacagacttt

SEQ ID NO: 15259 - DNA, 24 bp, Satellite tobacco mosaic virus
tacactgataggctgcccgttctg

SEQ ID NO: 15260 - DNA, 22 bp, Homo sapiens
caccataaacaaggcagacttt

SEQ ID NO: 15261 - DNA, 17 bp, Homo sapiens
cacctgattttaagact

SEQ ID NO: 15262 - DNA, 19 bp, Homo sapiens
cacctgatttgaagaacaa

SEQ ID NO: 15263 - DNA, 23 bp, Homo sapiens
caccctggaatcagacagacttt

SEQ ID NO: 15264 - DNA, 17 bp, Homo sapiens
acctatttctcagactt

SEQ ID NO: 15265 - DNA, 18 bp, Homo sapiens
cacttatttacaaaacaa

SEQ ID NO: 15266 - DNA, 18 bp, Homo sapiens
tgttctacagcagacttt

SEQ ID NO: 15267 - DNA, 18 bp, Homo sapiens
cccaatgaaacagacttt

SEQ ID NO: 15268 - DNA, 26 bp, Homo sapiens
cacctgatctacaagacaaatacttt

SEQ ID NO: 15269 - DNA, 17 bp, Homo sapiens
tgatataaacagacttt

SEQ ID NO: 15270 - DNA, 66 bp, Satellite tobacco mosaic virus
ggcgtctaagatattcttccatcaacttattaacatttttgactagggaagatacattatgacgtc

SEQ ID NO: 15271 - DNA, 24 bp, Satellite tobacco mosaic virus
tctaagatattcttccatcaactt

SEQ ID NO: 15272 - DNA, 21 bp, Satellite tobacco mosaic virus
gggaagatacattatgacgtc

SEQ ID NO: 15273 - DNA, 17 bp, Homo sapiens
tctaaatattcttccat

SEQ ID NO: 15274 - DNA, 21 bp, Homo sapiens
tctcaattcttccattaactt

SEQ ID NO: 15275 - DNA, 18 bp, Homo sapiens
tctgggatattctctcat

SEQ ID NO: 15276 - DNA, 16 bp, Homo sapiens
taagatattctgtcaa

SEQ ID NO: 15277 - DNA, 17 bp, Homo sapiens
ggggggacacatccgcc

SEQ ID NO: 15278 - DNA, 14 bp, Homo sapiens
gagaagaatgacgt

SEQ ID NO: 15279 - DNA, 18 bp, Homo sapiens
gggaaaatatcctacgtc

SEQ ID NO: 15280 - DNA, 18 bp, Homo sapiens
gggaaatacacattcatg

SEQ ID NO: 15281 - DNA, 20 bp, Homo sapiens
gagaaacttaattatgacgt

SEQ ID NO: 15282 - DNA, 22 bp, Homo sapiens
gggaaaatacaaaatatatgtc

SEQ ID NO: 15283 - DNA, 18 bp, Homo sapiens
aggaggagcaatgacgtc

SEQ ID NO: 15284 - DNA, 19 bp, Homo sapiens
gggaagatcgggacgcgtc

SEQ ID NO: 15285 - DNA, 78 bp, Satellite tobacco mosaic virus
ggcctggaggacgcgggccagcacgtgaaagtgaggtgcctctttgacgtccttcacgagctggccctcctgcgggcc

SEQ ID NO: 15286 - DNA, 24 bp, Satellite tobacco mosaic virus
cacgagctggccctcctgcgggcc

SEQ ID NO: 15287 - DNA, 24 bp, Satellite tobacco mosaic virus
ggccagcacgtgaaagtgaggtgc

SEQ ID NO: 15288 - DNA, 16 bp, Homo sapiens
cacgagctgcctctgg

SEQ ID NO: 15289 - DNA, 16 bp, Homo sapiens
cggggctggcccgggg

SEQ ID NO: 15290 - DNA, 19 bp, Homo sapiens
cacgagctgactctggggc

SEQ ID NO: 15291 - DNA, 20 bp, Homo sapiens
caccagctggcccccagggc

SEQ ID NO: 15292 - DNA, 16 bp, Homo sapiens
gagctggctgcagggc

SEQ ID NO: 15293 - DNA, 16 bp, Homo sapiens
gagctggcgcttgagc

SEQ ID NO: 15294 - DNA, 14 bp, Homo sapiens
cgagcggccgcggg

SEQ ID NO: 15295 - DNA, 15 bp, Homo sapiens
gagctggccttgggg

SEQ ID NO: 15296 - DNA, 16 bp, Homo sapiens
cacgtgttcttgcggg

SEQ ID NO: 15297 - DNA, 19 bp, Homo sapiens
cgggcggcaggtgcgggcc

SEQ ID NO: 15298 - DNA, 19 bp, Homo sapiens
cgggctggccccgagagcc

SEQ ID NO: 15299 - DNA, 20 bp, Homo sapiens
gagctggccctacctggaag

SEQ ID NO: 15300 - DNA, 19 bp, Homo sapiens
cacgagctggctcctgaag

SEQ ID NO: 15301 - DNA, 22 bp, Homo sapiens
caaggataagccttcctgcggg

SEQ ID NO: 15302 - DNA, 21 bp, Homo sapiens
cgggctgggctgggccgggcc

SEQ ID NO: 15303 - DNA, 17 bp, Homo sapiens
cgggctgttctcccggc

SEQ ID NO: 15304 - DNA, 22 bp, Homo sapiens
gagctggccccggatgtgggcc

SEQ ID NO: 15305 - DNA, 15 bp, Homo sapiens
gctgaccctctggac

SEQ ID NO: 15306 - DNA, 15 bp, Homo sapiens
gagctggcctggggc

SEQ ID NO: 15307 - DNA, 16 bp, Homo sapiens
gagctggctctgctgg

SEQ ID NO: 15308 - DNA, 18 bp, Homo sapiens
cacagctggctctcccac

SEQ ID NO: 15309 - DNA, 20 bp, Homo sapiens
cgagcggccccgggggggcc

SEQ ID NO: 15310 - DNA, 16 bp, Homo sapiens
caagctggctcttggc

SEQ ID NO: 15311 - DNA, 20 bp, Homo sapiens
accggctcttcctgcgggcc

SEQ ID NO: 15312 - DNA, 17 bp, Homo sapiens
cgggctggccccagggc

SEQ ID NO: 15313 - DNA, 17 bp, Homo sapiens
cgggccggcttcgcggg

SEQ ID NO: 15314 - DNA, 18 bp, Homo sapiens
gactggccctgcacggcc

SEQ ID NO: 15315 - DNA, 19 bp, Homo sapiens
cacggcctggccctcccgc

SEQ ID NO: 15316 - DNA, 16 bp, Homo sapiens
cacgggtccctgtggg

SEQ ID NO: 15317 - DNA, 17 bp, Homo sapiens
gctggccctgctgaggc

SEQ ID NO: 15318 - DNA, 16 bp, Homo sapiens
cgcagctggcctgggg

SEQ ID NO: 15319 - DNA, 64 bp, Satellite tobacco mosaic virus
ggccacctgctttcaccccttctacttcaagggcttcacctccaaccacctgagctcggtggcc

SEQ ID NO: 15320 - DNA, 24 bp, Satellite tobacco mosaic virus
gggcttcacctccaaccacctgag

SEQ ID NO: 15321 - DNA, 24 bp, Satellite tobacco mosaic virus
acctgctttcaccccttctacttc

SEQ ID NO: 15322 - DNA, 17 bp, Homo sapiens
gggctccagtcacctga

SEQ ID NO: 15323 - DNA, 18 bp, Homo sapiens
gggctgcacctgagcctg

SEQ ID NO: 15324 - DNA, 24 bp, Homo sapiens
gggctgtggccggagtcacctgag

SEQ ID NO: 15325 - DNA, 24 bp, Homo sapiens
gggcctcagccccagctgcctgag

SEQ ID NO: 15326 - DNA, 18 bp, Homo sapiens
ggccttctggccacctga

SEQ ID NO: 15327 - DNA, 82 bp, Rabbit fibroma virus
atgttttttatctctttcagtatgtgaatagataggtattttatctctattcatcatcgaatttaagagatccgataaacat

SEQ ID NO: 15328 - DNA, 24 bp, Rabbit fibroma virus
ttcatcatcgaatttaagagatcc

SEQ ID NO: 15329 - DNA, 16 bp, Homo sapiens
tcattccaagagatcc

SEQ ID NO: 15330 - DNA, 18 bp, Homo sapiens
ttcctcattttaagagat

SEQ ID NO: 15331 - DNA, 76 bp, Rabbit fibroma virus
tgggattttacttaatataatattatttcccgtaataaattttattagaaatgccaaatctataagaaaagtccta

SEQ ID NO: 15332 - DNA, 24 bp, Rabbit fibroma virus
ttagaaatgccaaatctataagaa

SEQ ID NO: 15333 - DNA, 24 bp, Rabbit fibroma virus
ttttacttaatataatattatttc

SEQ ID NO: 15334 - DNA, 21 bp, Homo sapiens
ttaaaaatgccaagataagaa

SEQ ID NO: 15335 - DNA, 21 bp, Homo sapiens
ttagaaatgttaacctttaag

SEQ ID NO: 15336 - DNA, 75 bp, Human adenovirus F
cgggttttttatctctttcagtatgtgaatagataggtattttatctctattcatcatcgaatttaagagatccg

SEQ ID NO: 15337 - DNA, 18 bp, Human adenovirus F
tcgaatttaagagatccg

SEQ ID NO: 15338 - DNA, 24 bp, Human adenovirus F
agtatgtgaatagataggtatttt

SEQ ID NO: 15339 - DNA, 18 bp, Homo sapiens
cgagtctcaagagatccg

SEQ ID NO: 15340 - DNA, 18 bp, Homo sapiens
ccgggttcaagagattcg

SEQ ID NO: 15341 - DNA, 75 bp, Human adenovirus F
gagtatttagggttaagttacctgatcccaataaatttggccttccagataacacagtatatgatcctaactctc

SEQ ID NO: 15342 - DNA, 24 bp, Human adenovirus F
taacacagtatatgatcctaactc

SEQ ID NO: 15343 - DNA, 24 bp, Human adenovirus F
taagttacctgatcccaataaatt

SEQ ID NO: 15344 - DNA, 16 bp, Homo sapiens
acgcagtgtcctaact

SEQ ID NO: 15345 - DNA, 17 bp, Homo sapiens
cacagcacattttaact

SEQ ID NO: 15346 - DNA, 18 bp, Homo sapiens
acacagcaggtcctggct

SEQ ID NO: 15347 - DNA, 20 bp, Homo sapiens
cagtggcacaatcctggctc

SEQ ID NO: 15348 - DNA, 20 bp, Homo sapiens
cagtcgcacaatcctggctc

SEQ ID NO: 15349 - DNA, 19 bp, Homo sapiens
acacagtatagtctcacaa

SEQ ID NO: 15350 - DNA, 19 bp, Homo sapiens
taacacagagcccctgact

SEQ ID NO: 15351 - DNA, 18 bp, Homo sapiens
taacgcggtacatggtcc

SEQ ID NO: 15352 - DNA, 19 bp, Homo sapiens
taacatagtatatatacct

SEQ ID NO: 15353 - DNA, 97 bp, Human adenovirus F
attttaggaactatgttcatggtatcctggcgaatattaaaactatcaatgatatgattatcgttttcatcttttatcaccatatagtttctaagat

SEQ ID NO: 15354 - DNA, 24 bp, Human adenovirus F
ttcatggtatcctggcgaatatta

SEQ ID NO: 15355 - DNA, 25 bp, Homo sapiens
catggtatctttactgggaatatta

SEQ ID NO: 15356 - DNA, 62 bp, Human adenovirus F
tgtatgtgtgcatgttgtatgttttgtattgtttgcctgtttgtatgttgtgtatatgtaca

SEQ ID NO: 15357 - DNA, 24 bp, Human adenovirus F
tgtgtgcatgttgtatgttttgta

SEQ ID NO: 15358 - DNA, 17 bp, Human adenovirus F
tgttgtgtatatgtaca

SEQ ID NO: 15359 - DNA, 25 bp, Homo sapiens
tgtgtgcatgtgtgtaggagcctgt

SEQ ID NO: 15360 - DNA, 18 bp, Homo sapiens
tgtgtgcatgtgtgcagt

SEQ ID NO: 15361 - DNA, 18 bp, Homo sapiens
tgtgtgcatgtgtgtgtt

SEQ ID NO: 15362 - DNA, 19 bp, Homo sapiens
tgagtgcatgctgttttgt

SEQ ID NO: 15363 - DNA, 19 bp, Homo sapiens
tgtgtgtgtgtgtgtctgt

SEQ ID NO: 15364 - DNA, 19 bp, Homo sapiens
tgtgtggcatttgttttgt

SEQ ID NO: 15365 - DNA, 19 bp, Homo sapiens
tgtgtgcatgtgtgagtgt

SEQ ID NO: 15366 - DNA, 23 bp, Homo sapiens
tgtgtgcatgtgtgtgcatttgt

SEQ ID NO: 15367 - DNA, 19 bp, Homo sapiens
tgtgtgcatttgtgtatgt

SEQ ID NO: 15368 - DNA, 19 bp, Homo sapiens
tgtgtgtgtgtttgttttg

SEQ ID NO: 15369 - DNA, 23 bp, Homo sapiens
tgtgtgtatgttatgtatatgta

SEQ ID NO: 15370 - DNA, 23 bp, Homo sapiens
tgtgtgcatgtttgtgtgtgtgt

SEQ ID NO: 15371 - DNA, 18 bp, Homo sapiens
tgtgtttgtttgttttgt

SEQ ID NO: 15372 - DNA, 17 bp, Homo sapiens
tgtgtgcatgtgtgtgt

SEQ ID NO: 15373 - DNA, 17 bp, Homo sapiens
tgtgtgtgtgtgtatat

SEQ ID NO: 15374 - DNA, 19 bp, Homo sapiens
tgtgtgcgtgtgtgcgtgt

SEQ ID NO: 15375 - DNA, 18 bp, Homo sapiens
tgtgtgcgtgtgtgtatg

SEQ ID NO: 15376 - DNA, 23 bp, Homo sapiens
tgtgtgcatgtttgtgtgcgtgt

SEQ ID NO: 15377 - DNA, 17 bp, Homo sapiens
tgtgtgtatgtgtgtgt

SEQ ID NO: 15378 - DNA, 23 bp, Homo sapiens
tgtgtgtgtgtgtgtctgcgtgt

SEQ ID NO: 15379 - DNA, 19 bp, Homo sapiens
tgtgtgtgtgtgtgtgtct

SEQ ID NO: 15380 - DNA, 19 bp, Homo sapiens
tgtgtgtgtgtatgtgtgt

SEQ ID NO: 15381 - DNA, 19 bp, Homo sapiens
tgtgtgtgtgtgtgtatgt

SEQ ID NO: 15382 - DNA, 18 bp, Homo sapiens
tgtgtgtgtgttgtgtat

SEQ ID NO: 15383 - DNA, 24 bp, Homo sapiens
tgtgtgtgtgttgtctcatcagta

SEQ ID NO: 15384 - DNA, 22 bp, Homo sapiens
tgtgtgcgtgtgtataaaaagt

SEQ ID NO: 15385 - DNA, 21 bp, Homo sapiens
tgtgggcatgtttttgtttgt

SEQ ID NO: 15386 - DNA, 65 bp, Human adenovirus F
atgtgtggttgcacccaatgagtaaggtactgtccctttattgtttctttgtccttattacacat

SEQ ID NO: 15387 - DNA, 21 bp, Human adenovirus F
ttctttgtccttattacacat

SEQ ID NO: 15388 - DNA, 24 bp, Human adenovirus F
ggttgcacccaatgagtaaggtac

SEQ ID NO: 15389 - DNA, 17 bp, Homo sapiens
tttgaccccttacacat

SEQ ID NO: 15390 - DNA, 19 bp, Homo sapiens
ctctttgtcaagtaataca

SEQ ID NO: 15391 - DNA, 17 bp, Homo sapiens
tctttaatattacacat

SEQ ID NO: 15392 - DNA, 16 bp, Homo sapiens
ttccttgtccttaaca

SEQ ID NO: 15393 - DNA, 16 bp, Homo sapiens
ttctttttcccacaca

SEQ ID NO: 15394 - DNA, 18 bp, Homo sapiens
tctttgttcattacacat

SEQ ID NO: 15395 - DNA, 19 bp, Homo sapiens
ttctgtgtcccctacacat

SEQ ID NO: 15396 - DNA, 17 bp, Homo sapiens
ttcttgtccttagcaca

SEQ ID NO: 15397 - DNA, 21 bp, Homo sapiens
ttccttgtcctgatgccacat

SEQ ID NO: 15398 - DNA, 19 bp, Homo sapiens
ttctttatcttatccacat

SEQ ID NO: 15399 - DNA, 68 bp, Rat cytomegalovirus
gaccccaaccgcggtacccactgatctttatctttatgaagaaaaacaggaactgcggttgccccgtt

SEQ ID NO: 15400 - DNA, 21 bp, Rat cytomegalovirus
aggaactgcggttgccccgtt

SEQ ID NO: 15401 - DNA, 24 bp, Rat cytomegalovirus
tacccactgatctttatctttatg

SEQ ID NO: 15402 - DNA, 19 bp, Homo sapiens
aggaactgaggaccttgtt

SEQ ID NO: 15403 - DNA, 18 bp, Homo sapiens
ggaatgaactgccctgtt

SEQ ID NO: 15404 - DNA, 22 bp, Homo sapiens
agaaactgctgaatgccttgtt

SEQ ID NO: 15405 - DNA, 19 bp, Homo sapiens
aggaactggggggcacgtt

SEQ ID NO: 15406 - DNA, 15 bp, Homo sapiens
ggaggctgaccccgt

SEQ ID NO: 15407 - DNA, 20 bp, Homo sapiens
aggcactgtgaagccccgtt

SEQ ID NO: 15408 - DNA, 21 bp, Homo sapiens
aggaactgcaggttttgcgtt

SEQ ID NO: 15409 - DNA, 17 bp, Homo sapiens
aggagtactgccccgtt

SEQ ID NO: 15410 - DNA, 90 bp, Bovine enterovirus
ggtgttgtgccccctccctccacaagtttagatgatacctataggtacttgcagtctcgcgccattacttgccaaaagggggccgccgcc

SEQ ID NO: 15411 - DNA, 24 bp, Bovine enterovirus
cacaagtttagatgatacctatag

SEQ ID NO: 15412 - DNA, 24 bp, Bovine enterovirus
cattacttgccaaaagggggccgc

SEQ ID NO: 15413 - DNA, 17 bp, Homo sapiens
agtttagatgcttatag

SEQ ID NO: 15414 - DNA, 104 bp, Bovine enterovirus
ggcatttttttaacaggcagggtactatgggtgaggaggtgcctcagtctttttaccttaaggggacctcctcccgggcaacccttagcagttctgtgtatgcc

SEQ ID NO: 15415 - DNA, 24 bp, Bovine enterovirus
ctcccgggcaacccttagcagttc

SEQ ID NO: 15416 - DNA, 24 bp, Bovine enterovirus
taacaggcagggtactatgggtga

SEQ ID NO: 15417 - DNA, 18 bp, Homo sapiens
ctcccgggccagtcagtt

SEQ ID NO: 15418 - DNA, 23 bp, Homo sapiens
tcctgggcccaagcttagcagtt

SEQ ID NO: 15419 - DNA, 24 bp, Homo sapiens
ctcccaggtagtttttcaacagtt

SEQ ID NO: 15420 - DNA, 17 bp, Homo sapiens
tcctggggtcagcagtt

SEQ ID NO: 15421 - DNA, 19 bp, Homo sapiens
ctcccgggcggatcaggtt

SEQ ID NO: 15422 - DNA, 130 bp, Human herpesvirus 2
aaagtgtcaacatttgaagaaggcagttggaacctccagtctcgaccacacacataatgtccataactcatgttttcaaaaggacacctctttagtcgatccatacttcctgttttccctaaacactctt

SEQ ID NO: 15423 - DNA, 24 bp, Human herpesvirus 2
aaggacacctctttagtcgatcca

SEQ ID NO: 15424 - DNA, 24 bp, Human herpesvirus 2
aagaaggcagttggaacctccagt

SEQ ID NO: 15425 - DNA, 23 bp, Homo sapiens
aagaaggaaacaaaaccttcagt

SEQ ID NO: 15426 - DNA, 14 bp, Homo sapiens
agaaggcagtgcca

SEQ ID NO: 15427 - DNA, 24 bp, Homo sapiens
aagaggcagaacagagcctccagt

SEQ ID NO: 15428 - DNA, 21 bp, Homo sapiens
aaaaggcatcatatttccagt

SEQ ID NO: 15429 - DNA, 21 bp, Homo sapiens
gaaggcagtggtacactcagt

SEQ ID NO: 15430 - DNA, 16 bp, Homo sapiens
aagaaggcattgacca

SEQ ID NO: 15431 - DNA, 21 bp, Homo sapiens
gaagggtgggctccctccagt

SEQ ID NO: 15432 - DNA, 17 bp, Homo sapiens
gggagcgagacctccag

SEQ ID NO: 15433 - DNA, 21 bp, Homo sapiens
ggaaaggcagttcccttcagt

SEQ ID NO: 15434 - DNA, 22 bp, Homo sapiens
aagagggttgatggcctccagt

SEQ ID NO: 15435 - DNA, 22 bp, Homo sapiens
ggcaggctaaaagacctccagt

SEQ ID NO: 15436 - DNA, 21 bp, Homo sapiens
gagggcacgccaccttccagt

SEQ ID NO: 15437 - DNA, 66 bp, Human herpesvirus 2
taattgaggttcccggcaaatgttggatagataggtaacttctcacatttgcctggaccttttttg

SEQ ID NO: 15438 - DNA, 24 bp, Human herpesvirus 2
tcacatttgcctggaccttttttg

SEQ ID NO: 15439 - DNA, 24 bp, Human herpesvirus 2
tgaggttcccggcaaatgttggat

SEQ ID NO: 15440 - DNA, 18 bp, Homo sapiens
tttgggaaaccttttttg

SEQ ID NO: 15441 - DNA, 24 bp, Homo sapiens
tcacatttctttggagcatttttg

SEQ ID NO: 15442 - DNA, 130 bp, Human herpesvirus 2
cgtgagagtctgtaacaccgcttcacccagaagagactggctaaggaagcagcttgagaggggaagtgcctaaacccttcccgaaagctgaaagtctcttctgctagtcaagcgtggtgcagacctcatg

SEQ ID NO: 15443 - DNA, 24 bp, Human herpesvirus 2
cgaaagctgaaagtctcttctgct

SEQ ID NO: 15444 - DNA, 24 bp, Human herpesvirus 2
tgtaacaccgcttcacccagaaga

SEQ ID NO: 15445 - DNA, 21 bp, Homo sapiens
agctgaacaaagtcttctgct

SEQ ID NO: 15446 - DNA, 15 bp, Homo sapiens
aagagctgaaagctg

SEQ ID NO: 15447 - DNA, 18 bp, Homo sapiens
gctgaaagtctctctgct

SEQ ID NO: 15448 - DNA, 20 bp, Homo sapiens
gaaagctgggagtcctcctg

SEQ ID NO: 15449 - DNA, 15 bp, Homo sapiens
aaactgaagttctgc

SEQ ID NO: 15450 - DNA, 20 bp, Homo sapiens
gaaggctggagtcctctgct

SEQ ID NO: 15451 - DNA, 21 bp, Homo sapiens
gaaagtgaatatccttttgct

SEQ ID NO: 15452 - DNA, 23 bp, Homo sapiens
gaaagcagaaacgaggctctgct

SEQ ID NO: 15453 - DNA, 17 bp, Homo sapiens
gaaagtgtctcttctgc

SEQ ID NO: 15454 - DNA, 17 bp, Homo sapiens
cggcagcctctcttctg

SEQ ID NO: 15455 - DNA, 93 bp, Monkeypox virus
ggtttttttatcccttggaattatgttaaaaataggtgttttttctttaaacataagagaatttataatatcagataaagggattaaaaaatc

SEQ ID NO: 15456 - DNA, 24 bp, Monkeypox virus
tatgttaaaaataggtgttttttc

SEQ ID NO: 15457 - DNA, 24 bp, Monkeypox virus
tataatatcagataaagggattaa

SEQ ID NO: 15458 - DNA, 17 bp, Homo sapiens
tatgttaaagatgtttc

SEQ ID NO: 15459 - DNA, 21 bp, Homo sapiens
tgttttgaaaatagatgtttc

SEQ ID NO: 15460 - DNA, 61 bp, Monkeypox virus
gcacttatttcatgaatttcatttttagaactcattaaaatagtatttgaaaaataagtgt

SEQ ID NO: 15461 - DNA, 24 bp, Monkeypox virus
ttcatgaatttcatttttagaact

SEQ ID NO: 15462 - DNA, 21 bp, Monkeypox virus
tagtatttgaaaaataagtgt

SEQ ID NO: 15463 - DNA, 21 bp, Homo sapiens
ttcaagaatttcatcaaaact

SEQ ID NO: 15464 - DNA, 24 bp, Homo sapiens
ttcatgaatattcattcctacact

SEQ ID NO: 15465 - DNA, 21 bp, Homo sapiens
ttcatgaatttccatttttag

SEQ ID NO: 15466 - DNA, 19 bp, Homo sapiens
atgaatttcataaaggact

SEQ ID NO: 15467 - DNA, 76 bp, Monkeypox virus
gcccacagatcgcaccttcaaccgataagagtctctagatgacaaatcgacagttagttggaaagtgttcgggggc

SEQ ID NO: 15468 - DNA, 18 bp, Monkeypox virus
tggaaagtgttcgggggc

SEQ ID NO: 15469 - DNA, 24 bp, Monkeypox virus
gatcgcaccttcaaccgataagag

SEQ ID NO: 15470 - DNA, 18 bp, Homo sapiens
cggagggcagctgggggc

SEQ ID NO: 15471 - DNA, 16 bp, Homo sapiens
tggaagccccaggggc

SEQ ID NO: 15472 - DNA, 15 bp, Homo sapiens
tggaagctcaggggc

SEQ ID NO: 15473 - DNA, 17 bp, Homo sapiens
tgggtgccccagggggc

SEQ ID NO: 15474 - DNA, 15 bp, Homo sapiens
tggggcgccgggggc

SEQ ID NO: 15475 - DNA, 19 bp, Homo sapiens
ggagagggagcttgggggc

SEQ ID NO: 15476 - DNA, 18 bp, Homo sapiens
tgggaagtagcgctgggc

SEQ ID NO: 15477 - DNA, 18 bp, Homo sapiens
tgaaaagtcacagggggc

SEQ ID NO: 15478 - DNA, 17 bp, Homo sapiens
tagaaggacccaggggc

SEQ ID NO: 15479 - DNA, 17 bp, Homo sapiens
tgggaaatgtccttagc

SEQ ID NO: 15480 - DNA, 17 bp, Homo sapiens
tggaaaatgaaaaaggc

SEQ ID NO: 15481 - DNA, 17 bp, Homo sapiens
tggtgagtgtcgagggc

SEQ ID NO: 15482 - DNA, 18 bp, Homo sapiens
tggggtgcccgatggggc

SEQ ID NO: 15483 - DNA, 17 bp, Homo sapiens
tggggcgtgctgggggc

SEQ ID NO: 15484 - DNA, 15 bp, Homo sapiens
tggcaggctgggggc

SEQ ID NO: 15485 - DNA, 14 bp, Homo sapiens
tggagtccaagggc

SEQ ID NO: 15486 - DNA, 16 bp, Homo sapiens
tggagttgctaggggc

SEQ ID NO: 15487 - DNA, 16 bp, Homo sapiens
tgggggtgtcagaggc

SEQ ID NO: 15488 - DNA, 16 bp, Homo sapiens
tgggggctccgagggc

SEQ ID NO: 15489 - DNA, 16 bp, Homo sapiens
cggaagtcccaagggc

SEQ ID NO: 15490 - DNA, 19 bp, Homo sapiens
cggagagtgatcccggggg

SEQ ID NO: 15491 - DNA, 19 bp, Homo sapiens
tggagattgttcaaagggc

SEQ ID NO: 15492 - DNA, 16 bp, Homo sapiens
tggagaggccaaaggc

SEQ ID NO: 15493 - DNA, 16 bp, Homo sapiens
tggaaaggccaggggc

SEQ ID NO: 15494 - DNA, 15 bp, Homo sapiens
tggggtcccgggggc

SEQ ID NO: 15495 - DNA, 19 bp, Homo sapiens
tggaaagtggtaactcggg

SEQ ID NO: 15496 - DNA, 15 bp, Homo sapiens
tggaaaatgagaggc

SEQ ID NO: 15497 - DNA, 16 bp, Homo sapiens
tagaaagttaaagggc

SEQ ID NO: 15498 - DNA, 17 bp, Homo sapiens
tggaaggctccaagggc

SEQ ID NO: 15499 - DNA, 20 bp, Homo sapiens
tggaaaggtccagaaggggc

SEQ ID NO: 15500 - DNA, 22 bp, Homo sapiens
tggaaagtttgtcctcgggggc

SEQ ID NO: 15501 - DNA, 18 bp, Homo sapiens
tagagctgggtcgggggc

SEQ ID NO: 15502 - DNA, 16 bp, Homo sapiens
cgggagccccaggggc

SEQ ID NO: 15503 - DNA, 15 bp, Homo sapiens
tgggccctcgggggc

SEQ ID NO: 15504 - DNA, 15 bp, Homo sapiens
tggaaggccgggggc

SEQ ID NO: 15505 - DNA, 18 bp, Homo sapiens
tggaaaatgaggaggggg

SEQ ID NO: 15506 - DNA, 17 bp, Homo sapiens
tggaaggcgcggcgggc

SEQ ID NO: 15507 - DNA, 17 bp, Homo sapiens
tgcaaagtgccgtcggc

SEQ ID NO: 15508 - DNA, 18 bp, Homo sapiens
tagggagtgctgaggggg

SEQ ID NO: 15509 - DNA, 16 bp, Homo sapiens
cggaggaagcgggggc

SEQ ID NO: 15510 - DNA, 16 bp, Homo sapiens
tggaaagtttctaagc

SEQ ID NO: 15511 - DNA, 18 bp, Homo sapiens
tggatgcccccttggggg

SEQ ID NO: 15512 - DNA, 16 bp, Homo sapiens
cggaagtgttagaggc

SEQ ID NO: 15513 - DNA, 16 bp, Homo sapiens
tgggagtcccgagggc

SEQ ID NO: 15514 - DNA, 18 bp, Homo sapiens
ggaaagtcatcgaggggc

SEQ ID NO: 15515 - DNA, 18 bp, Homo sapiens
ggagagtgtagaaggggc

SEQ ID NO: 15516 - DNA, 16 bp, Homo sapiens
tgggaaggtcgagggc

SEQ ID NO: 15517 - DNA, 18 bp, Homo sapiens
cggggagtgttaaaaggc

SEQ ID NO: 15518 - DNA, 18 bp, Homo sapiens
tggaagctattttggggg

SEQ ID NO: 15519 - DNA, 19 bp, Homo sapiens
tgaaaagtggacgctgggc

SEQ ID NO: 15520 - DNA, 18 bp, Homo sapiens
ggggaggtcccagggggc

SEQ ID NO: 15521 - DNA, 17 bp, Homo sapiens
tgggaaatgtcaagggc

SEQ ID NO: 15522 - DNA, 17 bp, Homo sapiens
tggaaaactgagggggc

SEQ ID NO: 15523 - DNA, 17 bp, Homo sapiens
tggaaatgtcctcaggc

SEQ ID NO: 15524 - DNA, 18 bp, Homo sapiens
tggggtggtgtcgaaggc

SEQ ID NO: 15525 - DNA, 16 bp, Homo sapiens
tggtcaggtcgggggc

SEQ ID NO: 15526 - DNA, 17 bp, Homo sapiens
tggaggcccgaaggggc

SEQ ID NO: 15527 - DNA, 14 bp, Homo sapiens
tggaggtcgggggc

SEQ ID NO: 15528 - DNA, 22 bp, Homo sapiens
tggaaagtggtggaggcggggg

SEQ ID NO: 15529 - DNA, 18 bp, Homo sapiens
tggagatgtgccaggggc

SEQ ID NO: 15530 - DNA, 16 bp, Homo sapiens
tggacggtcgtggggc

SEQ ID NO: 15531 - DNA, 17 bp, Homo sapiens
tggaaagtttcggtggc

SEQ ID NO: 15532 - DNA, 18 bp, Homo sapiens
tggagatgtcccgagggc

SEQ ID NO: 15533 - DNA, 16 bp, Homo sapiens
tgggtgggccaggggc

SEQ ID NO: 15534 - DNA, 18 bp, Homo sapiens
tggcagccggccgggggc

SEQ ID NO: 15535 - DNA, 17 bp, Homo sapiens
tggaaagttcaaagggc

SEQ ID NO: 15536 - DNA, 18 bp, Homo sapiens
tggaaggagtggagaggc

SEQ ID NO: 15537 - DNA, 61 bp, Monkeypox virus
tcattgagtttagtggcaaacgacaaacagacaaaaattgtagatgccgccagctagttga

SEQ ID NO: 15538 - DNA, 21 bp, Monkeypox virus
tagatgccgccagctagttga

SEQ ID NO: 15539 - DNA, 24 bp, Monkeypox virus
tgagtttagtggcaaacgacaaac

SEQ ID NO: 15540 - DNA, 19 bp, Homo sapiens
tagatgccatcattcttga

SEQ ID NO: 15541 - DNA, 20 bp, Homo sapiens
tagatgcccttaagccctga

SEQ ID NO: 15542 - DNA, 16 bp, Homo sapiens
taaatggagctagttg

SEQ ID NO: 15543 - DNA, 20 bp, Homo sapiens
gatgccgctgtacctcttga

SEQ ID NO: 15544 - DNA, 18 bp, Homo sapiens
tagataccagctgtgttg

SEQ ID NO: 15545 - DNA, 18 bp, Homo sapiens
tagatgccgtcaggctag

SEQ ID NO: 15546 - DNA, 17 bp, Homo sapiens
gatcagaagctagttga

SEQ ID NO: 15547 - DNA, 16 bp, Homo sapiens
tagatgatgctaattg

SEQ ID NO: 15548 - DNA, 18 bp, Homo sapiens
tagatgccaggccggttg

SEQ ID NO: 15549 - DNA, 93 bp, Monkeypox virus
gtcggggcactttttccttccctcgggggttacaactaaattcgtcagtacgatacagtgaactccggggggaaggagaaaaaccgctccggc

SEQ ID NO: 15550 - DNA, 24 bp, Monkeypox virus
gggggttacaactaaattcgtcag

SEQ ID NO: 15551 - DNA, 24 bp, Monkeypox virus
tacagtgaactccggggggaagga

SEQ ID NO: 15552 - DNA, 19 bp, Homo sapiens
gggggtcatggctggattc

SEQ ID NO: 15553 - DNA, 60 bp, Human herpesvirus 6
tttttatgagtatttttacaaaaatgcataaagtgtatgtcgtatgtatatttataaaaa

SEQ ID NO: 15554 - DNA, 24 bp, Human herpesvirus 6
tgagtatttttacaaaaatgcata

SEQ ID NO: 15555 - DNA, 21 bp, Human herpesvirus 6
tcgtatgtatatttataaaaa

SEQ ID NO: 15556 - DNA, 20 bp, Homo sapiens
gtatgaaatatttataaaaa

SEQ ID NO: 15557 - DNA, 19 bp, Homo sapiens
gtatgtacattcatgaaaa

SEQ ID NO: 15558 - DNA, 99 bp, Fowlpox virus
ccctggcagttgtgtgtattccccttctcccagtggctctattattacttctgattctcaattatttaataagccatattggttacataaggcccaggg

SEQ ID NO: 15559 - DNA, 24 bp, Fowlpox virus
tgtgtgtattccccttctcccagt

SEQ ID NO: 15560 - DNA, 24 bp, Fowlpox virus
taagccatattggttacataaggc

SEQ ID NO: 15561 - DNA, 17 bp, Homo sapiens
tgtgtgtattttcttct

SEQ ID NO: 15562 - DNA, 17 bp, Homo sapiens
tgcaccccttctcttag

SEQ ID NO: 15563 - DNA, 130 bp, Fowlpox virus
acgtatacgtagtaagaaataatatgttagcacatatatgtatgtttgtatgtatggttttgtatgttgtatgtatgtatgtatttgtgtgatatattactgtattttgtttgtttgcgtgcgtgtatgt

SEQ ID NO: 15564 - DNA, 24 bp, Fowlpox virus
tacgtagtaagaaataatatgtta

SEQ ID NO: 15565 - DNA, 24 bp, Fowlpox virus
tatattactgtattttgtttgttt

SEQ ID NO: 15566 - DNA, 17 bp, Homo sapiens
tacgtaggagaaataat

SEQ ID NO: 15567 - DNA, 65 bp, Fowlpox virus
cctaaaggaaaaattttcctccgatttggatcaatatccccttggtcgaaagtttttagttcagg

SEQ ID NO: 15568 - DNA, 20 bp, Fowlpox virus
tcgaaagtttttagttcagg

SEQ ID NO: 15569 - DNA, 24 bp, Fowlpox virus
taaaggaaaaattttcctccgatt

SEQ ID NO: 15570 - DNA, 14 bp, Homo sapiens
gaaagcagttcagg

SEQ ID NO: 15571 - DNA, 20 bp, Homo sapiens
tcaggggcagacagttcagg

SEQ ID NO: 15572 - DNA, 18 bp, Homo sapiens
gaaactttttaattaagg

SEQ ID NO: 15573 - DNA, 17 bp, Homo sapiens
gaaagtttacaattagg

SEQ ID NO: 15574 - DNA, 18 bp, Homo sapiens
gaaagtttctgttaaagg

SEQ ID NO: 15575 - DNA, 19 bp, Homo sapiens
gaaagtttctaactacagg

SEQ ID NO: 15576 - DNA, 16 bp, Homo sapiens
gaagctttctttcagg

SEQ ID NO: 15577 - DNA, 16 bp, Homo sapiens
gaagtcagagttcagg

SEQ ID NO: 15578 - DNA, 15 bp, Homo sapiens
tccaaagtaattcag

SEQ ID NO: 15579 - DNA, 17 bp, Homo sapiens
gaggttttcagcccggg

SEQ ID NO: 15580 - DNA, 18 bp, Homo sapiens
tccaaagtttagagcagg

SEQ ID NO: 15581 - DNA, 17 bp, Homo sapiens
ccgaaagtttagacagg

SEQ ID NO: 15582 - DNA, 61 bp, Fowlpox virus
gagttgtcagcactgatgattatgtgtctcgcacaagcatattttatcatgcaggcagttc

SEQ ID NO: 15583 - DNA, 24 bp, Fowlpox virus
tgtcagcactgatgattatgtgtc

SEQ ID NO: 15584 - DNA, 19 bp, Fowlpox virus
tttatcatgcaggcagttc

SEQ ID NO: 15585 - DNA, 19 bp, Homo sapiens
tgtcagcactggtggtcat

SEQ ID NO: 15586 - DNA, 21 bp, Homo sapiens
tgtcagtggtgatgatcacgt

SEQ ID NO: 15587 - DNA, 20 bp, Homo sapiens
tcagcagaacaattgtgtgt

SEQ ID NO: 15588 - DNA, 67 bp, Fowlpox virus
acggtaactcgtatatttttacgtacaataaagcgatttgtaaaaataaaaactttacgtaatccgt

SEQ ID NO: 15589 - DNA, 24 bp, Fowlpox virus
actcgtatatttttacgtacaata

SEQ ID NO: 15590 - DNA, 24 bp, Fowlpox virus
taaaaataaaaactttacgtaatc

SEQ ID NO: 15591 - DNA, 20 bp, Homo sapiens
gtatattctcccgtgcaata

SEQ ID NO: 15592 - DNA, 125 bp, Gallid herpesvirus 3
ggcgaggaatttgatttgcagtttattttccagttatgtgttattaatttaactacagaggttatggcctatctgcatggtatgaatgctacgttactggaagactggaatttcggttccttgcc

SEQ ID NO: 15593 - DNA, 24 bp, Gallid herpesvirus 3
tggtatgaatgctacgttactgga

SEQ ID NO: 15594 - DNA, 24 bp, Gallid herpesvirus 3
aggaatttgatttgcagtttattt

SEQ ID NO: 15595 - DNA, 21 bp, Homo sapiens
aggggattgcacagtttattt

SEQ ID NO: 15596 - DNA, 22 bp, Homo sapiens
aggatgttcaagcagtttattt

SEQ ID NO: 15597 - DNA, 62 bp, Molluscum contagiosum virus
taatataatcctaattcatcttttttatcgtataaaaattctatagcataggttttatattg

SEQ ID NO: 15598 - DNA, 19 bp, Molluscum contagiosum virus
tagcataggttttatattg

SEQ ID NO: 15599 - DNA, 24 bp, Molluscum contagiosum virus
tataatcctaattcatctttttta

SEQ ID NO: 15600 - DNA, 18 bp, Homo sapiens
gcatagacctcagtattg

SEQ ID NO: 15601 - DNA, 16 bp, Homo sapiens
cagcataggaatattg

SEQ ID NO: 15602 - DNA, 18 bp, Homo sapiens
agcataggtcagtaattg

SEQ ID NO: 15603 - DNA, 62 bp, Paramecium bursaria Chlorella virus 1
caaaatggtgtttgaaaaataggtgtacaacacgtcaccgtttatcaggtacgccgagtttg

SEQ ID NO: 15604 - DNA, 24 bp, Paramecium bursaria Chlorella virus 1
caccgtttatcaggtacgccgagt

SEQ ID NO: 15605 - DNA, 24 bp, Paramecium bursaria Chlorella virus 1
aatggtgtttgaaaaataggtgta

SEQ ID NO: 15606 - DNA, 17 bp, Homo sapiens
gttttcaggtaccgaat

SEQ ID NO: 15607 - DNA, 20 bp, Homo sapiens
gtctcgcaggtgcgccgagt

SEQ ID NO: 15608 - DNA, 62 bp, Paramecium bursaria Chlorella virus 1
tgtcgtctttatccttcaggaccatgtaattcttcaagtatggtacctttaacaagacgaca

SEQ ID NO: 15609 - DNA, 19 bp, Paramecium bursaria Chlorella virus 1
tacctttaacaagacgaca

SEQ ID NO: 15610 - DNA, 24 bp, Paramecium bursaria Chlorella virus 1
tcgtctttatccttcaggaccatg

SEQ ID NO: 15611 - DNA, 19 bp, Homo sapiens
cacctttaacactatgaca

SEQ ID NO: 15612 - DNA, 18 bp, Homo sapiens
cacctttaatcagactga

SEQ ID NO: 15613 - DNA, 65 bp, Paramecium bursaria Chlorella virus 1
gaaacgcgagatcgatcagaaacgttctagaattagtctgtaatatgtcgatatctccatatttc

SEQ ID NO: 15614 - DNA, 24 bp, Paramecium bursaria Chlorella virus 1
ttagtctgtaatatgtcgatatct

SEQ ID NO: 15615 - DNA, 24 bp, Paramecium bursaria Chlorella virus 1
cgagatcgatcagaaacgttctag

SEQ ID NO: 15616 - DNA, 19 bp, Homo sapiens
ttaatctgtaatattaatc

SEQ ID NO: 15617 - DNA, 23 bp, Homo sapiens
ttagtctggagtgtcagtgatat

SEQ ID NO: 15618 - DNA, 16 bp, Homo sapiens
gtctgtaatatatatc

SEQ ID NO: 15619 - DNA, 18 bp, Homo sapiens
agtctgtaatataaatat

SEQ ID NO: 15620 - DNA, 60 bp, Tupaia herpesvirus
gacgcaaatactcctccattaacgcgtttacgttacttaccagaggggacacgttgtgtc

SEQ ID NO: 15621 - DNA, 21 bp, Tupaia herpesvirus
ccagaggggacacgttgtgtc

SEQ ID NO: 15622 - DNA, 24 bp, Tupaia herpesvirus
cgcaaatactcctccattaacgcg

SEQ ID NO: 15623 - DNA, 24 bp, Homo sapiens
cagagggatgtgtgacacaacgtg

SEQ ID NO: 15624 - DNA, 15 bp, Homo sapiens
gaggggactactgtc

SEQ ID NO: 15625 - DNA, 20 bp, Homo sapiens
ccagagggcacgcccgcctc

SEQ ID NO: 15626 - DNA, 18 bp, Homo sapiens
gaggggacgtggcttgtc

SEQ ID NO: 15627 - DNA, 16 bp, Homo sapiens
gagggggagctgtgtc

SEQ ID NO: 15628 - DNA, 17 bp, Homo sapiens
ccagaggggagcgaggt

SEQ ID NO: 15629 - DNA, 17 bp, Homo sapiens
gaggggacactccggtc

SEQ ID NO: 15630 - DNA, 17 bp, Homo sapiens
cagaagggatgtcctgc

SEQ ID NO: 15631 - DNA, 19 bp, Homo sapiens
cagagggagatgccccgtc

SEQ ID NO: 15632 - DNA, 15 bp, Homo sapiens
ccagagagggtgtgt

SEQ ID NO: 15633 - DNA, 16 bp, Homo sapiens
cagagggggcgttggc

SEQ ID NO: 15634 - DNA, 25 bp, Homo sapiens
ccagaggggctgttgacacaacgtg

SEQ ID NO: 15635 - DNA, 18 bp, Homo sapiens
ccggagggaacatcagtc

SEQ ID NO: 15636 - DNA, 20 bp, Homo sapiens
tgagaggggatacgaaggtc

SEQ ID NO: 15637 - DNA, 24 bp, Homo sapiens
ccagaggaggcatgggaaaggtgt

SEQ ID NO: 15638 - DNA, 18 bp, Homo sapiens
cagatcaagtgttgtgtc

SEQ ID NO: 15639 - DNA, 20 bp, Homo sapiens
ccagagagggcgggcttgtc

SEQ ID NO: 15640 - DNA, 21 bp, Homo sapiens
ccagagagggtactcctttgt

SEQ ID NO: 15641 - DNA, 19 bp, Homo sapiens
tgagaggggatgactttgt

SEQ ID NO: 15642 - DNA, 18 bp, Homo sapiens
cagaggggcgggcgctgt

SEQ ID NO: 15643 - DNA, 21 bp, Homo sapiens
ccagaggggagcccaccagtc

SEQ ID NO: 15644 - DNA, 24 bp, Homo sapiens
cagagggacatgcgacacaacgtg

SEQ ID NO: 15645 - DNA, 20 bp, Homo sapiens
ccagaggggtgttgcttgtc

SEQ ID NO: 15646 - DNA, 25 bp, Homo sapiens
ccagagggacagtcgacacaacgtg

SEQ ID NO: 15647 - DNA, 16 bp, Homo sapiens
gagggggtgctgcgtc

SEQ ID NO: 15648 - DNA, 24 bp, Homo sapiens
cagagggggttttgacacaacgtg

SEQ ID NO: 15649 - DNA, 19 bp, Homo sapiens
caaaggggacgcttctgtc

SEQ ID NO: 15650 - DNA, 18 bp, Homo sapiens
ccaaggggacccagtgtc

SEQ ID NO: 15651 - DNA, 17 bp, Homo sapiens
agaggggaaagtgagtc

SEQ ID NO: 15652 - DNA, 16 bp, Homo sapiens
cagaggggaaatggtg

SEQ ID NO: 15653 - DNA, 15 bp, Homo sapiens
ccagggggaccgtgt

SEQ ID NO: 15654 - DNA, 18 bp, Homo sapiens
gaggggacaccccccatc

SEQ ID NO: 15655 - DNA, 24 bp, Homo sapiens
cagaggggctgtcgacacaacgtg

SEQ ID NO: 15656 - DNA, 15 bp, Homo sapiens
ccagagggcacgtgt

SEQ ID NO: 15657 - DNA, 18 bp, Homo sapiens
ccggagggggcgccgcgc

SEQ ID NO: 15658 - DNA, 18 bp, Homo sapiens
gagggggtacactgtgtc

SEQ ID NO: 15659 - DNA, 20 bp, Homo sapiens
ccagagggtacagtaacgtc

SEQ ID NO: 15660 - DNA, 21 bp, Homo sapiens
ccagaggggagctgaagagtc

SEQ ID NO: 15661 - DNA, 19 bp, Homo sapiens
ccagaggggcaggcttgtc

SEQ ID NO: 15662 - DNA, 15 bp, Homo sapiens
ccagaggaggatgcg

SEQ ID NO: 15663 - DNA, 17 bp, Homo sapiens
ccagaggggccgccctg

SEQ ID NO: 15664 - DNA, 17 bp, Homo sapiens
ccagggggaacacctgc

SEQ ID NO: 15665 - DNA, 25 bp, Homo sapiens
ccaggggggtactcgacacaacgtg

SEQ ID NO: 15666 - DNA, 25 bp, Homo sapiens
ccagaggggaacttgacacaacgtg

SEQ ID NO: 15667 - DNA, 22 bp, Homo sapiens
cagagaggaaaacgtgttgtgt

SEQ ID NO: 15668 - DNA, 18 bp, Homo sapiens
cacgggggacacagcatc

SEQ ID NO: 15669 - DNA, 22 bp, Homo sapiens
ccagaggagggcagtgccatgt

SEQ ID NO: 15670 - DNA, 18 bp, Homo sapiens
ccgtaggggttgtgtgtc

SEQ ID NO: 15671 - DNA, 18 bp, Homo sapiens
ccagtggccagttgtgtc

SEQ ID NO: 15672 - DNA, 25 bp, Homo sapiens
ccagagggatgctcgacacaacgtg

SEQ ID NO: 15673 - DNA, 24 bp, Homo sapiens
cagagggggtggcgacacaacgtg

SEQ ID NO: 15674 - DNA, 18 bp, Homo sapiens
gaggggatgggctatgtc

SEQ ID NO: 15675 - DNA, 17 bp, Homo sapiens
ccagagagggaaagtgt

SEQ ID NO: 15676 - DNA, 16 bp, Homo sapiens
ccagaggagacgctgt

SEQ ID NO: 15677 - DNA, 25 bp, Homo sapiens
ccagagggggtttcgacacaacgtg

SEQ ID NO: 15678 - DNA, 17 bp, Homo sapiens
agaggaggacattacat

SEQ ID NO: 15679 - DNA, 18 bp, Homo sapiens
ccaggggagacatacatt

SEQ ID NO: 15680 - DNA, 18 bp, Homo sapiens
ccgaggggggtctctgtc

SEQ ID NO: 15681 - DNA, 16 bp, Homo sapiens
cagagggggtggtgcc

SEQ ID NO: 15682 - DNA, 19 bp, Homo sapiens
ccagaggagggcacgccac

SEQ ID NO: 15683 - DNA, 14 bp, Homo sapiens
agaggggagtgtgc

SEQ ID NO: 15684 - DNA, 20 bp, Homo sapiens
ccagagggacacctggggtc

SEQ ID NO: 15685 - DNA, 14 bp, Homo sapiens
agagggggtcgtgt

SEQ ID NO: 15686 - DNA, 17 bp, Homo sapiens
ccagagaggagacgtgt

SEQ ID NO: 15687 - DNA, 23 bp, Homo sapiens
agaggggaagttgacacaacgtg

SEQ ID NO: 15688 - DNA, 14 bp, Homo sapiens
gaggggcatgtgtc

SEQ ID NO: 15689 - DNA, 19 bp, Homo sapiens
cagggggacactgagagtc

SEQ ID NO: 15690 - DNA, 101 bp, Tupaia herpesvirus
gtgtactagacgggaacatgtccggtcctttgagcgtcaagacacccaaaacgtctgtatacgtggatacgaggatcgtttgcagttctatgatggtatac

SEQ ID NO: 15691 - DNA, 24 bp, Tupaia herpesvirus
tacgtggatacgaggatcgtttgc

SEQ ID NO: 15692 - DNA, 24 bp, Tupaia herpesvirus
gtcctttgagcgtcaagacaccca

SEQ ID NO: 15693 - DNA, 18 bp, Homo sapiens
gtggatactgaggaaggc

SEQ ID NO: 15694 - DNA, 87 bp, Saimiriine herpesvirus 2
gttcgtcgttccgtgtccagggggagcgtcccagccggcgacgttttgacgagctgttgctttccctgacgaaccttctgcacgaat

SEQ ID NO: 15695 - DNA, 24 bp, Saimiriine herpesvirus 2
tgttgctttccctgacgaaccttc

SEQ ID NO: 15696 - DNA, 24 bp, Saimiriine herpesvirus 2
tgtccagggggagcgtcccagccg

SEQ ID NO: 15697 - DNA, 20 bp, Homo sapiens
tgctgcttttcctggtcctt

SEQ ID NO: 15698 - DNA, 21 bp, Homo sapiens
ttgctttctctggaaaccttc

SEQ ID NO: 15699 - DNA, 21 bp, Homo sapiens
tgttgtttccttccactcttc

SEQ ID NO: 15700 - DNA, 24 bp, Homo sapiens
tgtgctttcctcacagaggtcttc

SEQ ID NO: 15701 - DNA, 18 bp, Homo sapiens
ttgctttcctcctgcctt

SEQ ID NO: 15702 - DNA, 25 bp, Homo sapiens
tgttgctttctcctgatgcccattc

SEQ ID NO: 15703 - DNA, 18 bp, Homo sapiens
tgccagggagctcctggc

SEQ ID NO: 15704 - DNA, 21 bp, Homo sapiens
tgtccaggtgtggtccagccg

SEQ ID NO: 15705 - DNA, 23 bp, Homo sapiens
tgtgcagggggaggcccactagc

SEQ ID NO: 15706 - DNA, 19 bp, Homo sapiens
tgccaggggagtcctggcc

SEQ ID NO: 15707 - DNA, 20 bp, Homo sapiens
tatccaagtggcgtctcggc

SEQ ID NO: 15708 - DNA, 19 bp, Homo sapiens
tgtccaggtgggtgcggcc

SEQ ID NO: 15709 - DNA, 22 bp, Homo sapiens
tgtcggggctcgatcccagccg

SEQ ID NO: 15710 - DNA, 19 bp, Homo sapiens
tgtccagggtctctcagcc

SEQ ID NO: 15711 - DNA, 16 bp, Homo sapiens
gtcggggtgtcccagc

SEQ ID NO: 15712 - DNA, 24 bp, Homo sapiens
tccagggggaaaaagtcttagtcg

SEQ ID NO: 15713 - DNA, 21 bp, Homo sapiens
gtccagggggagccgcggccg

SEQ ID NO: 15714 - DNA, 24 bp, Homo sapiens
tccagggggtcccggcgtcttagc

SEQ ID NO: 15715 - DNA, 95 bp, Saimiriine herpesvirus 2
ccgtgtcctcgctttcttctctctccgcttccccgcgatccggtccttcgttcggtcggctttcacggggttagaaaaagagagcgtgcgcgcgg

SEQ ID NO: 15716 - DNA, 24 bp, Saimiriine herpesvirus 2
cacggggttagaaaaagagagcgt

SEQ ID NO: 15717 - DNA, 24 bp, Saimiriine herpesvirus 2
cctcgctttcttctctctccgctt

SEQ ID NO: 15718 - DNA, 17 bp, Homo sapiens
ggagttaggaggggcat

SEQ ID NO: 15719 - DNA, 21 bp, Homo sapiens
cgggctccgaaaggagagcgt

SEQ ID NO: 15720 - DNA, 18 bp, Homo sapiens
cacggggctggggagagc

SEQ ID NO: 15721 - DNA, 16 bp, Homo sapiens
ggggccagggagggcg

SEQ ID NO: 15722 - DNA, 19 bp, Homo sapiens
cacggggtgggagaaggca

SEQ ID NO: 15723 - DNA, 17 bp, Homo sapiens
acggggctggacagagg

SEQ ID NO: 15724 - DNA, 22 bp, Homo sapiens
cgggagttccgagagagagcgt

SEQ ID NO: 15725 - DNA, 15 bp, Homo sapiens
gggttggaaaagcat

SEQ ID NO: 15726 - DNA, 20 bp, Homo sapiens
cggcggtcccgggagagcgt

SEQ ID NO: 15727 - DNA, 20 bp, Homo sapiens
ctggcaccctttctccgctt

SEQ ID NO: 15728 - DNA, 19 bp, Homo sapiens
cctcgctttctttctttcc

SEQ ID NO: 15729 - DNA, 22 bp, Homo sapiens
ctctgcaattctctctctgctt

SEQ ID NO: 15730 - DNA, 17 bp, Homo sapiens
ctttcttcttctctgct

SEQ ID NO: 15731 - DNA, 16 bp, Homo sapiens
ccccgcttcctttccg

SEQ ID NO: 15732 - DNA, 18 bp, Homo sapiens
tctctttcttctcaaccc

SEQ ID NO: 15733 - DNA, 18 bp, Homo sapiens
cttgctgtcttccccgct

SEQ ID NO: 15734 - DNA, 17 bp, Homo sapiens
cctcttttcttccactt

SEQ ID NO: 15735 - DNA, 23 bp, Homo sapiens
tcactttctttaaataattgctt

SEQ ID NO: 15736 - DNA, 16 bp, Homo sapiens
cctcttttcttcttct

SEQ ID NO: 15737 - DNA, 20 bp, Homo sapiens
tcttttcttctctctccctt

SEQ ID NO: 15738 - DNA, 22 bp, Homo sapiens
gctttcatttctttctccgctt

SEQ ID NO: 15739 - DNA, 23 bp, Homo sapiens
cttccttttctctttttttgctt

SEQ ID NO: 15740 - DNA, 22 bp, Homo sapiens
tccctttcttttctgggggctt

SEQ ID NO: 15741 - DNA, 18 bp, Homo sapiens
cgctttcttttctggctt

SEQ ID NO: 15742 - DNA, 20 bp, Homo sapiens
cctccttctgcggtctctct

SEQ ID NO: 15743 - DNA, 22 bp, Homo sapiens
ccttttttctttcccaacactt

SEQ ID NO: 15744 - DNA, 18 bp, Homo sapiens
cctcgtttccttctccct

SEQ ID NO: 15745 - DNA, 17 bp, Homo sapiens
cctctttttcttcttct

SEQ ID NO: 15746 - DNA, 18 bp, Homo sapiens
cttgctttctttctttct

SEQ ID NO: 15747 - DNA, 19 bp, Homo sapiens
cttgctttctcttttctct

SEQ ID NO: 15748 - DNA, 20 bp, Homo sapiens
cctcgttttcttcttggtct

SEQ ID NO: 15749 - DNA, 22 bp, Homo sapiens
ctccgtttttccctctctgctt

SEQ ID NO: 15750 - DNA, 60 bp, Saimiriine herpesvirus 2
ctgggtagcgctaccgagggtgcgtgctcatctctaaccgcctctgtgcgtagtgtccag

SEQ ID NO: 15751 - DNA, 18 bp, Saimiriine herpesvirus 2
tctgtgcgtagtgtccag

SEQ ID NO: 15752 - DNA, 24 bp, Saimiriine herpesvirus 2
tagcgctaccgagggtgcgtgctc

SEQ ID NO: 15753 - DNA, 18 bp, Homo sapiens
tctgtgcgctatgtacag

SEQ ID NO: 15754 - DNA, 16 bp, Homo sapiens
tctgtgcagtggccag

SEQ ID NO: 15755 - DNA, 16 bp, Homo sapiens
cctctgcagtgtccag

SEQ ID NO: 15756 - DNA, 15 bp, Homo sapiens
cctgtgcgcagccag

SEQ ID NO: 15757 - DNA, 18 bp, Homo sapiens
tctatgcccagtgtccag

SEQ ID NO: 15758 - DNA, 14 bp, Homo sapiens
tccgtggtgtccag

SEQ ID NO: 15759 - DNA, 15 bp, Homo sapiens
tctgtgcgtctccag

SEQ ID NO: 15760 - DNA, 17 bp, Homo sapiens
tctgtggccacacccag

SEQ ID NO: 15761 - DNA, 17 bp, Homo sapiens
tctgtgtccaagtccag

SEQ ID NO: 15762 - DNA, 19 bp, Homo sapiens
tgcgcagtgcggtgtccag

SEQ ID NO: 15763 - DNA, 17 bp, Homo sapiens
tctgtgcggttatgcag

SEQ ID NO: 15764 - DNA, 17 bp, Homo sapiens
tctatgcacacgttcag

SEQ ID NO: 15765 - DNA, 18 bp, Homo sapiens
ctgtccatcagtgtccag

SEQ ID NO: 15766 - DNA, 18 bp, Homo sapiens
ctgtgcgtcccaatccag

SEQ ID NO: 15767 - DNA, 18 bp, Homo sapiens
tctcggaccagtgtccag

SEQ ID NO: 15768 - DNA, 18 bp, Homo sapiens
cctgaccctagtgtccag

SEQ ID NO: 15769 - DNA, 18 bp, Homo sapiens
tctgtgatttatgtccag

SEQ ID NO: 15770 - DNA, 19 bp, Homo sapiens
tctgtgcacgtgtgtgtcc

SEQ ID NO: 15771 - DNA, 17 bp, Homo sapiens
tctgtgtgtgtgtccag

SEQ ID NO: 15772 - DNA, 19 bp, Homo sapiens
tctggaagtgtgtgtccag

SEQ ID NO: 15773 - DNA, 18 bp, Homo sapiens
ctgtgtgtgtgtgtccag

SEQ ID NO: 15774 - DNA, 16 bp, Homo sapiens
tctgtagtaattccag

SEQ ID NO: 15775 - DNA, 17 bp, Homo sapiens
tctgtgcatctgctcag

SEQ ID NO: 15776 - DNA, 20 bp, Homo sapiens
tctgtgcgtggtgctctcag

SEQ ID NO: 15777 - DNA, 18 bp, Homo sapiens
tctgttcacaacgtccag

SEQ ID NO: 15778 - DNA, 15 bp, Homo sapiens
tctgtgtgtatccaa

SEQ ID NO: 15779 - DNA, 17 bp, Homo sapiens
tctgagcgaatatccag

SEQ ID NO: 15780 - DNA, 17 bp, Homo sapiens
tctgctgtgatgtccag

SEQ ID NO: 15781 - DNA, 15 bp, Homo sapiens
tctgtgcgctctcag

SEQ ID NO: 15782 - DNA, 16 bp, Homo sapiens
tctgatgagcgtccag

SEQ ID NO: 15783 - DNA, 18 bp, Homo sapiens
tctgtgcatggtatttcc

SEQ ID NO: 15784 - DNA, 15 bp, Homo sapiens
tctgagcacgtccag

SEQ ID NO: 15785 - DNA, 16 bp, Homo sapiens
tcttggccatgtccag

SEQ ID NO: 15786 - DNA, 22 bp, Homo sapiens
tccgtgcatgagaggtgtccag

SEQ ID NO: 15787 - DNA, 18 bp, Homo sapiens
ctgtgtggctgcgtccag

SEQ ID NO: 15788 - DNA, 17 bp, Homo sapiens
tctatacatttgtccag

SEQ ID NO: 15789 - DNA, 16 bp, Homo sapiens
tctgtgcagataccag

SEQ ID NO: 15790 - DNA, 16 bp, Homo sapiens
tctgtagcatctccag

SEQ ID NO: 15791 - DNA, 16 bp, Homo sapiens
tctgtgcagcacccag

SEQ ID NO: 15792 - DNA, 18 bp, Homo sapiens
ctgtcagcaggtgtccag

SEQ ID NO: 15793 - DNA, 18 bp, Homo sapiens
tctgtacagatggtccag

SEQ ID NO: 15794 - DNA, 15 bp, Homo sapiens
tctttgaatgtccag

SEQ ID NO: 15795 - DNA, 16 bp, Homo sapiens
tctgtggatgcaccag

SEQ ID NO: 15796 - DNA, 17 bp, Homo sapiens
cctgtgtgcacacccag

SEQ ID NO: 15797 - DNA, 15 bp, Homo sapiens
tctggccacgtccag

SEQ ID NO: 15798 - DNA, 16 bp, Homo sapiens
tctgaaccatgtccag

SEQ ID NO: 15799 - DNA, 16 bp, Homo sapiens
tctgtggcacacccag

SEQ ID NO: 15800 - DNA, 16 bp, Homo sapiens
tctggccaatgtccag

SEQ ID NO: 15801 - DNA, 15 bp, Homo sapiens
tctgtgcagtaacag

SEQ ID NO: 15802 - DNA, 15 bp, Homo sapiens
cctgtgcgaggccag

SEQ ID NO: 15803 - DNA, 18 bp, Homo sapiens
tcatgtgtccgcgtccag

SEQ ID NO: 15804 - DNA, 16 bp, Homo sapiens
tctgtgtagaatccag

SEQ ID NO: 15805 - DNA, 60 bp, Saimiriine herpesvirus 2
ggccagccgatgggtgccggtttggcggccgcggtcgccgccgtccaccaacgggaggcc

SEQ ID NO: 15806 - DNA, 24 bp, Saimiriine herpesvirus 2
agccgatgggtgccggtttggcgg

SEQ ID NO: 15807 - DNA, 17 bp, Saimiriine herpesvirus 2
tccaccaacgggaggcc

SEQ ID NO: 15808 - DNA, 18 bp, Homo sapiens
accggtgggtgccgaacg

SEQ ID NO: 15809 - DNA, 16 bp, Homo sapiens
tgggtgccggaggtgg

SEQ ID NO: 15810 - DNA, 130 bp, Saimiriine herpesvirus 2
aggagcggcgacgcgaagacgacggtgagtcgagcggtcggtcggtcggtcggtcacaacgcgcgtcgcggtcgtttgactgactgactgactgactgaccgaccgttcgccggctctcggcgccgcgtt

SEQ ID NO: 15811 - DNA, 17 bp, Saimiriine herpesvirus 2
gctctcggcgccgcgtt

SEQ ID NO: 15812 - DNA, 24 bp, Saimiriine herpesvirus 2
acgcgaagacgacggtgagtcgag

SEQ ID NO: 15813 - DNA, 18 bp, Homo sapiens
gctctcgctctcgctgtt

SEQ ID NO: 15814 - DNA, 19 bp, Homo sapiens
gctcccggcggaaactgtt

SEQ ID NO: 15815 - DNA, 68 bp, Human adenovirus E
tagaatacggggatatagatgttttacaaacaaatgctagaacatttttgattaatatagcctttcta

SEQ ID NO: 15816 - DNA, 24 bp, Human adenovirus E
ctagaacatttttgattaatatag

SEQ ID NO: 15817 - DNA, 24 bp, Human adenovirus E
ggatatagatgttttacaaacaaa

SEQ ID NO: 15818 - DNA, 24 bp, Homo sapiens
ctagaaattttatcctcaatatag

SEQ ID NO: 15819 - DNA, 21 bp, Homo sapiens
ggtatagatgggagccaaaca

SEQ ID NO: 15820 - DNA, 27 bp, Homo sapiens
agatatagatatatgtttgtaaacaaa

SEQ ID NO: 15821 - DNA, 22 bp, Homo sapiens
ggagtagaaacttacaaacaaa

SEQ ID NO: 15822 - DNA, 20 bp, Homo sapiens
ggaaatagatgccaggaaca

SEQ ID NO: 15823 - DNA, 24 bp, Homo sapiens
ggatgagatgtccccaaggacaaa

SEQ ID NO: 15824 - DNA, 21 bp, Homo sapiens
ggtgctaaatcttacaaacaa

SEQ ID NO: 15825 - DNA, 21 bp, Homo sapiens
ggactcaatgttttacaagca

SEQ ID NO: 15826 - DNA, 24 bp, Homo sapiens
ggtttagatgtcaagacagacaaa

SEQ ID NO: 15827 - DNA, 22 bp, Homo sapiens
ggataggggacaccacaaacaa

SEQ ID NO: 15828 - DNA, 67 bp, Human adenovirus E
ggcggtaacaaattcagagtacgctatacgtaataaaacgatgtacacgtacttttcaaataccgcc

SEQ ID NO: 15829 - DNA, 24 bp, Human adenovirus E
tacacgtacttttcaaataccgcc

SEQ ID NO: 15830 - DNA, 24 bp, Human adenovirus E
tcagagtacgctatacgtaataaa

SEQ ID NO: 15831 - DNA, 17 bp, Homo sapiens
gtgattcaaatactgcc

SEQ ID NO: 15832 - DNA, 22 bp, Homo sapiens
gcacctgtttttcaaaacagcc

SEQ ID NO: 15833 - DNA, 17 bp, Homo sapiens
tcagagtacattagtaa

SEQ ID NO: 15834 - DNA, 20 bp, Homo sapiens
tcagagtgtactgtacataa

SEQ ID NO: 15835 - DNA, 18 bp, Homo sapiens
ccagagtactcgtaataa

SEQ ID NO: 15836 - DNA, 71 bp, Human adenovirus E
caatttgcaaaacagtttttctgctgatttggatcagtttcctcttggcaggaagtttttaatgcaggttg

SEQ ID NO: 15837 - DNA, 24 bp, Human adenovirus E
tggcaggaagtttttaatgcaggt

SEQ ID NO: 15838 - DNA, 24 bp, Human adenovirus E
aacagtttttctgctgatttggat

SEQ ID NO: 15839 - DNA, 20 bp, Homo sapiens
gttttcttgttgatttggat

SEQ ID NO: 15840 - DNA, 14 bp, Homo sapiens
gtttttcttttgga

SEQ ID NO: 15841 - DNA, 21 bp, Homo sapiens
acggtttttctggcactggat

SEQ ID NO: 15842 - DNA, 60 bp, Human herpesvirus 5
ggcttcgttgcgtatggccaccaccacgttaaagagagacggtggcaccagctcgaagcc

SEQ ID NO: 15843 - DNA, 18 bp, Human herpesvirus 5
tggcaccagctcgaagcc

SEQ ID NO: 15844 - DNA, 24 bp, Human herpesvirus 5
cttcgttgcgtatggccaccacca

SEQ ID NO: 15845 - DNA, 16 bp, Homo sapiens
tggctgcttcgaagcc

SEQ ID NO: 15846 - DNA, 17 bp, Homo sapiens
tagcaccacccgaagcc

SEQ ID NO: 15847 - DNA, 15 bp, Homo sapiens
tggcaccaggcggcc

SEQ ID NO: 15848 - DNA, 16 bp, Homo sapiens
tggcccagcccaagcc

SEQ ID NO: 15849 - DNA, 15 bp, Homo sapiens
tggcccatcaaagcc

SEQ ID NO: 15850 - DNA, 20 bp, Homo sapiens
tggcaccagtgcgtgtggcc

SEQ ID NO: 15851 - DNA, 19 bp, Homo sapiens
ggcaccagccagggaagcc

SEQ ID NO: 15852 - DNA, 15 bp, Homo sapiens
tgggccagcccagcc

SEQ ID NO: 15853 - DNA, 16 bp, Homo sapiens
tggcacaacccgagcc

SEQ ID NO: 15854 - DNA, 20 bp, Homo sapiens
ggcaccagcgctccggggcc

SEQ ID NO: 15855 - DNA, 16 bp, Homo sapiens
tggcaccaccccagcc

SEQ ID NO: 15856 - DNA, 19 bp, Homo sapiens
ggcaccagggaaaaaagcc

SEQ ID NO: 15857 - DNA, 15 bp, Homo sapiens
tggacgcccaaagcc

SEQ ID NO: 15858 - DNA, 15 bp, Homo sapiens
tagcaccaaaaagcc

SEQ ID NO: 15859 - DNA, 17 bp, Homo sapiens
tgtgccagctcatagcc

SEQ ID NO: 15860 - DNA, 18 bp, Homo sapiens
ggcaccagcccacaagcc

SEQ ID NO: 15861 - DNA, 18 bp, Homo sapiens
tggcaccagattcccagc

SEQ ID NO: 15862 - DNA, 17 bp, Homo sapiens
tggaaccacccaaagcc

SEQ ID NO: 15863 - DNA, 17 bp, Homo sapiens
tggcactacccaaagcc

SEQ ID NO: 15864 - DNA, 19 bp, Homo sapiens
tggcaccaccacccgggcc

SEQ ID NO: 15865 - DNA, 18 bp, Homo sapiens
tgccaccagcccccaagc

SEQ ID NO: 15866 - DNA, 16 bp, Homo sapiens
tgacgcccccaaagcc

SEQ ID NO: 15867 - DNA, 18 bp, Homo sapiens
tgacaccacatcaaaagc

SEQ ID NO: 15868 - DNA, 17 bp, Homo sapiens
tggaccagctcaaggcc

SEQ ID NO: 15869 - DNA, 18 bp, Homo sapiens
ggcaccagccaggacagc

SEQ ID NO: 15870 - DNA, 15 bp, Homo sapiens
tggaccagccccgcc

SEQ ID NO: 15871 - DNA, 16 bp, Homo sapiens
tggcaccacaaacgcc

SEQ ID NO: 15872 - DNA, 14 bp, Homo sapiens
tggcacccaaagcc

SEQ ID NO: 15873 - DNA, 15 bp, Homo sapiens
tggcaccaccgtgcc

SEQ ID NO: 15874 - DNA, 17 bp, Homo sapiens
tggcaccagcaccagcc

SEQ ID NO: 15875 - DNA, 15 bp, Homo sapiens
tgacaccaactggcc

SEQ ID NO: 15876 - DNA, 15 bp, Homo sapiens
tgacacacggaagcc

SEQ ID NO: 15877 - DNA, 18 bp, Homo sapiens
tggcaccactcacaggcc

SEQ ID NO: 15878 - DNA, 17 bp, Homo sapiens
tgtgccagcccagagcc

SEQ ID NO: 15879 - DNA, 17 bp, Homo sapiens
tgacaccatcaggagcc

SEQ ID NO: 15880 - DNA, 71 bp, Human herpesvirus 5
ggcgacatggttgatattgggtttggtgccatggattttaaaacattacaggaatctaaatcagatgtgcc

SEQ ID NO: 15881 - DNA, 24 bp, Human herpesvirus 5
tacaggaatctaaatcagatgtgc

SEQ ID NO: 15882 - DNA, 24 bp, Human herpesvirus 5
tattgggtttggtgccatggattt

SEQ ID NO: 15883 - DNA, 20 bp, Homo sapiens
gttgtggttgttatggattt

SEQ ID NO: 15884 - DNA, 19 bp, Homo sapiens
tattgggtttggaggaatt

SEQ ID NO: 15885 - DNA, 65 bp, Human herpesvirus 5
gtgcttaagtgctatcgctttcgggaacgcaaaaaaaaaagaggcttagtaaaatattatagtac

SEQ ID NO: 15886 - DNA, 24 bp, Human herpesvirus 5
taagtgctatcgctttcgggaacg

SEQ ID NO: 15887 - DNA, 21 bp, Human herpesvirus 5
cttagtaaaatattatagtac

SEQ ID NO: 15888 - DNA, 17 bp, Homo sapiens
taagtgctgctgctgga

SEQ ID NO: 15889 - DNA, 18 bp, Homo sapiens
ttagtaaaattacagtac

SEQ ID NO: 15890 - DNA, 19 bp, Homo sapiens
ctcagtaaaatcacagtac

SEQ ID NO: 15891 - DNA, 18 bp, Homo sapiens
ctcagtaaaataagagta

SEQ ID NO: 15892 - DNA, 18 bp, Homo sapiens
ttagcaaaatattcacgt

SEQ ID NO: 15893 - DNA, 85 bp, Human herpesvirus 5
gagcacagacaacaattcattaggactatgaaattaccacctacagtagattggtctttaggaaatgttgatgatctgtaagctt

SEQ ID NO: 15894 - DNA, 24 bp, Human herpesvirus 5
taggactatgaaattaccacctac

SEQ ID NO: 15895 - DNA, 24 bp, Human herpesvirus 5
tctttaggaaatgttgatgatctg

SEQ ID NO: 15896 - DNA, 16 bp, Homo sapiens
aggaaaattaccacct

SEQ ID NO: 15897 - DNA, 19 bp, Homo sapiens
ggactatgctcactatcta

SEQ ID NO: 15898 - DNA, 18 bp, Homo sapiens
gactatgaacaagcctac

SEQ ID NO: 15899 - DNA, 16 bp, Homo sapiens
ggagctaataccacct

SEQ ID NO: 15900 - DNA, 22 bp, Homo sapiens
aggatcaattaattaccatcta

SEQ ID NO: 15901 - DNA, 19 bp, Homo sapiens
tctttagcaaacatgatct

SEQ ID NO: 15902 - DNA, 18 bp, Homo sapiens
tcttctattgttgatgat

SEQ ID NO: 15903 - DNA, 17 bp, Homo sapiens
tttaggacctatgatct

SEQ ID NO: 15904 - DNA, 20 bp, Homo sapiens
tctttagggggctgttattg

SEQ ID NO: 15905 - DNA, 18 bp, Homo sapiens
tctttggcctctgatgat

SEQ ID NO: 15906 - DNA, 71 bp, Human herpesvirus 5
ccaacagatgcatatgtaaagcgcaccaatatattttatcatgcaggcagctcacgtttgcttgctgttgg

SEQ ID NO: 15907 - DNA, 24 bp, Human herpesvirus 5
tgtaaagcgcaccaatatatttta

SEQ ID NO: 15908 - DNA, 24 bp, Human herpesvirus 5
cagctcacgtttgcttgctgttgg

SEQ ID NO: 15909 - DNA, 21 bp, Homo sapiens
gccgcgtttgcctagtgttgg

SEQ ID NO: 15910 - DNA, 23 bp, Homo sapiens
cagcttatatttgctttcagagg

SEQ ID NO: 15911 - DNA, 18 bp, Homo sapiens
gcttatgtttgctttgct

SEQ ID NO: 15912 - DNA, 20 bp, Homo sapiens
agcttcgtttgtttgttgtt

SEQ ID NO: 15913 - DNA, 62 bp, Cryphonectria hypovirus 3
ctggggtaaacattttgggacaacctcctatggcatttagaggtttttgcccaatttcccag

SEQ ID NO: 15914 - DNA, 18 bp, Cryphonectria hypovirus 3
ttttgcccaatttcccag

SEQ ID NO: 15915 - DNA, 24 bp, Cryphonectria hypovirus 3
tttgggacaacctcctatggcatt

SEQ ID NO: 15916 - DNA, 19 bp, Homo sapiens
ctttgccctgcacctccag

SEQ ID NO: 15917 - DNA, 18 bp, Homo sapiens
ttctgcccgacaccccag

SEQ ID NO: 15918 - DNA, 17 bp, Homo sapiens
ttttgcttatttcccag

SEQ ID NO: 15919 - DNA, 16 bp, Homo sapiens
tcttggcctttcccag

SEQ ID NO: 15920 - DNA, 16 bp, Homo sapiens
ttttcccagaccccag

SEQ ID NO: 15921 - DNA, 20 bp, Homo sapiens
ttttcccagcattcccccag

SEQ ID NO: 15922 - DNA, 18 bp, Homo sapiens
ttctgcccaaagtctcag

SEQ ID NO: 15923 - DNA, 17 bp, Homo sapiens
ttttcccttctccccag

SEQ ID NO: 15924 - DNA, 18 bp, Homo sapiens
ttttgccatgtttcccag

SEQ ID NO: 15925 - DNA, 15 bp, Homo sapiens
tcttgtccctcccag

SEQ ID NO: 15926 - DNA, 17 bp, Homo sapiens
tcttgaccttttcccag

SEQ ID NO: 15927 - DNA, 15 bp, Homo sapiens
ttctgcatttcccag

SEQ ID NO: 15928 - DNA, 15 bp, Homo sapiens
ctttgctctccccag

SEQ ID NO: 15929 - DNA, 15 bp, Homo sapiens
ttctgccctcctcag

SEQ ID NO: 15930 - DNA, 18 bp, Homo sapiens
ttttggaccgtttcccag

SEQ ID NO: 15931 - DNA, 17 bp, Homo sapiens
ttctgcccttcccccag

SEQ ID NO: 15932 - DNA, 15 bp, Homo sapiens
ctttgcccaagccag

SEQ ID NO: 15933 - DNA, 17 bp, Homo sapiens
ctttgcccgaataccag

SEQ ID NO: 15934 - DNA, 22 bp, Homo sapiens
ttttccccaaaaaaattcccag

SEQ ID NO: 15935 - DNA, 14 bp, Homo sapiens
ttttgccctcccag

SEQ ID NO: 15936 - DNA, 20 bp, Homo sapiens
ttctgcccatcttctctcag

SEQ ID NO: 15937 - DNA, 19 bp, Homo sapiens
tttgcccagatttcattcc

SEQ ID NO: 15938 - DNA, 14 bp, Homo sapiens
ctctgctctcccag

SEQ ID NO: 15939 - DNA, 18 bp, Homo sapiens
ttttccccggtttcccag

SEQ ID NO: 15940 - DNA, 16 bp, Homo sapiens
ctttgccctcttccag

SEQ ID NO: 15941 - DNA, 18 bp, Homo sapiens
ttttcccaagcccctcag

SEQ ID NO: 15942 - DNA, 18 bp, Homo sapiens
tcttgccctgtcacccag

SEQ ID NO: 15943 - DNA, 18 bp, Homo sapiens
tcttgctctatctcccag

SEQ ID NO: 15944 - DNA, 17 bp, Homo sapiens
ctttgctcctcccccag

SEQ ID NO: 15945 - DNA, 19 bp, Homo sapiens
ttctgcccggcttccccag

SEQ ID NO: 15946 - DNA, 16 bp, Homo sapiens
tcttgcccatacccag

SEQ ID NO: 15947 - DNA, 19 bp, Homo sapiens
ttttacccacagaccccag

SEQ ID NO: 15948 - DNA, 18 bp, Homo sapiens
ctttgcccatcatcccag

SEQ ID NO: 15949 - DNA, 14 bp, Homo sapiens
ttttgcttccccag

SEQ ID NO: 15950 - DNA, 18 bp, Homo sapiens
tcttgccctttcgcccag

SEQ ID NO: 15951 - DNA, 15 bp, Homo sapiens
ttttgctttccccag

SEQ ID NO: 15952 - DNA, 15 bp, Homo sapiens
ttctgcccaccccag

SEQ ID NO: 15953 - DNA, 19 bp, Homo sapiens
ttttgcccaggataccccc

SEQ ID NO: 15954 - DNA, 17 bp, Homo sapiens
ttctgccctcctcccag

SEQ ID NO: 15955 - DNA, 15 bp, Homo sapiens
ttctgcttctcccag

SEQ ID NO: 15956 - DNA, 17 bp, Homo sapiens
tttcgcccaacatgcag

SEQ ID NO: 15957 - DNA, 15 bp, Homo sapiens
tcttgaacttcccag

SEQ ID NO: 15958 - DNA, 15 bp, Homo sapiens
ctttgtcctccccag

SEQ ID NO: 15959 - DNA, 19 bp, Homo sapiens
tttcgccctgactaatttc

SEQ ID NO: 15960 - DNA, 17 bp, Homo sapiens
ctttgctcctttcccag

SEQ ID NO: 15961 - DNA, 15 bp, Homo sapiens
ttctgcccaacccag

SEQ ID NO: 15962 - DNA, 16 bp, Homo sapiens
ttttcccaagccccag

SEQ ID NO: 15963 - DNA, 16 bp, Homo sapiens
ttctgccccaccccag

SEQ ID NO: 15964 - DNA, 18 bp, Homo sapiens
ttctgcccaatccaccag

SEQ ID NO: 15965 - DNA, 15 bp, Homo sapiens
ttttacccagcccag

SEQ ID NO: 15966 - DNA, 15 bp, Homo sapiens
tcttgccctcaccag

SEQ ID NO: 15967 - DNA, 17 bp, Homo sapiens
tcttgcccaggccacag

SEQ ID NO: 15968 - DNA, 17 bp, Homo sapiens
ttttcccaactgtccag

SEQ ID NO: 15969 - DNA, 15 bp, Homo sapiens
ttctgctcttcccag

SEQ ID NO: 15970 - DNA, 19 bp, Homo sapiens
ttttgccctgcctccccag

SEQ ID NO: 15971 - DNA, 16 bp, Homo sapiens
tcttgctgcctcccag

SEQ ID NO: 15972 - DNA, 16 bp, Homo sapiens
ttctgcccttatccag

SEQ ID NO: 15973 - DNA, 18 bp, Homo sapiens
tcttgcccaaaaccttcc

SEQ ID NO: 15974 - DNA, 15 bp, Homo sapiens
ttttacatttcccag

SEQ ID NO: 15975 - DNA, 16 bp, Homo sapiens
ttttgcccaactgcag

SEQ ID NO: 15976 - DNA, 18 bp, Homo sapiens
ttttgccgtacttcccag

SEQ ID NO: 15977 - DNA, 68 bp, Cryphonectria hypovirus 3
gttgacatgtggagccactggcgcgttgccgacaacggcgacgacaataacccgctccgccacgcagc

SEQ ID NO: 15978 - DNA, 24 bp, Cryphonectria hypovirus 3
acgacaataacccgctccgccacg

SEQ ID NO: 15979 - DNA, 24 bp, Cryphonectria hypovirus 3
tgtggagccactggcgcgttgccg

SEQ ID NO: 15980 - DNA, 16 bp, Homo sapiens
gacaataagatccgcc

SEQ ID NO: 15981 - DNA, 19 bp, Homo sapiens
cggcaaggcccgctccacc

SEQ ID NO: 15982 - DNA, 15 bp, Homo sapiens
cgaaacccgcttcac

SEQ ID NO: 15983 - DNA, 22 bp, Homo sapiens
cgcgggaccgcgctccgctgcg

SEQ ID NO: 15984 - DNA, 19 bp, Homo sapiens
gacaataatccccagcacg

SEQ ID NO: 15985 - DNA, 103 bp, Cryphonectria hypovirus 3
caacacacaagccaatatgtgctgctaacacacctatatacctgtaatcattattccttttatagtttatgtgtttgtgctttgcgtgtgtgtgtgtgtgttg

SEQ ID NO: 15986 - DNA, 24 bp, Cryphonectria hypovirus 3
tttgtgctttgcgtgtgtgtgtgt

SEQ ID NO: 15987 - DNA, 24 bp, Cryphonectria hypovirus 3
taacacacctatatacctgtaatc

SEQ ID NO: 15988 - DNA, 18 bp, Homo sapiens
tgtgtgtgtgtgtgtgtg

SEQ ID NO: 15989 - DNA, 21 bp, Homo sapiens
tgtgcacacgtgtgtgtgtgt

SEQ ID NO: 15990 - DNA, 14 bp, Homo sapiens
tgtggtgtgtgtgt

SEQ ID NO: 15991 - DNA, 25 bp, Homo sapiens
tctgtgtgagtgtgtgtgtgtgtgt

SEQ ID NO: 15992 - DNA, 22 bp, Homo sapiens
ttgtaagagtgtgtgtgtgtgt

SEQ ID NO: 15993 - DNA, 21 bp, Homo sapiens
tgtgcgtgtgtgtgtgtgtgt

SEQ ID NO: 15994 - DNA, 19 bp, Homo sapiens
tatgtgcgtgtgtgtgtgt

SEQ ID NO: 15995 - DNA, 23 bp, Homo sapiens
tttgtgtgtgtgtgtgtgtgtgt

SEQ ID NO: 15996 - DNA, 21 bp, Homo sapiens
tgtgtgtgcgtgtgtgtgtgt

SEQ ID NO: 15997 - DNA, 22 bp, Homo sapiens
tgtgtttgtgtgtgtgtgtgta

SEQ ID NO: 15998 - DNA, 21 bp, Homo sapiens
tctgtgtgtatgtgtgtgtgt

SEQ ID NO: 15999 - DNA, 21 bp, Homo sapiens
tgtgtttgtgtgtgtgtgtgt

SEQ ID NO: 16000 - DNA, 21 bp, Homo sapiens
tgtgtatgtgtgtgtgtgtgt

SEQ ID NO: 16001 - DNA, 23 bp, Homo sapiens
tgtgagagtgtgtgtgtgtgtgt

SEQ ID NO: 16002 - DNA, 23 bp, Homo sapiens
tgtgcatgtacgtgtgtgtgtgt

SEQ ID NO: 16003 - DNA, 21 bp, Homo sapiens
tgtacgtgtgtgtgtgtgtgt

SEQ ID NO: 16004 - DNA, 19 bp, Homo sapiens
tgtgttttggggtgtgtgt

SEQ ID NO: 16005 - DNA, 18 bp, Homo sapiens
tatgtgtgtgtgtgtgtg

SEQ ID NO: 16006 - DNA, 26 bp, Homo sapiens
tgtgcatgtttgtgtgtgtgtgtgta

SEQ ID NO: 16007 - DNA, 23 bp, Homo sapiens
tgtgcattggcgtgtgtgtgtgt

SEQ ID NO: 16008 - DNA, 20 bp, Homo sapiens
tttgtgctctgtaagtgtgt

SEQ ID NO: 16009 - DNA, 23 bp, Homo sapiens
tctgtgcacgcgtgtgtgtgtgt

SEQ ID NO: 16010 - DNA, 19 bp, Homo sapiens
tgtgtctgtgtgtgtgtgt

SEQ ID NO: 16011 - DNA, 18 bp, Homo sapiens
ccgtgtgtgtgtgtgtgt

SEQ ID NO: 16012 - DNA, 18 bp, Homo sapiens
tgtttgtgtgtgtgtgtg

SEQ ID NO: 16013 - DNA, 21 bp, Homo sapiens
tgtgtgtgagtgtgtgtgtgt

SEQ ID NO: 16014 - DNA, 21 bp, Homo sapiens
tgtgagtgtgtgtgtgtgtgt

SEQ ID NO: 16015 - DNA, 20 bp, Homo sapiens
tttgcaaggtgtgtgtgtgt

SEQ ID NO: 16016 - DNA, 18 bp, Homo sapiens
tgtatgtgtgtgtgtgtg

SEQ ID NO: 16017 - DNA, 21 bp, Homo sapiens
tttgtgtgcatgtgtgtgtgt

SEQ ID NO: 16018 - DNA, 21 bp, Homo sapiens
tgtgtgtgcatgtgtgtgtgt

SEQ ID NO: 16019 - DNA, 25 bp, Homo sapiens
tgtgaagttttgtgtgtgtgtgtgt

SEQ ID NO: 16020 - DNA, 20 bp, Homo sapiens
tttgtttttctggtgtgtgt

SEQ ID NO: 16021 - DNA, 28 bp, Homo sapiens
tttgtatcatatatgtgtgtgtgtgtgt

SEQ ID NO: 16022 - DNA, 20 bp, Homo sapiens
gtgaatgtgtgtgtgtgtgt

SEQ ID NO: 16023 - DNA, 18 bp, Homo sapiens
ctctgtgtgtgtgtgtgt

SEQ ID NO: 16024 - DNA, 19 bp, Homo sapiens
tttgtgtttttgtctgtgt

SEQ ID NO: 16025 - DNA, 23 bp, Homo sapiens
tctgtgtatgtgtgtgtgtgtgt

SEQ ID NO: 16026 - DNA, 23 bp, Homo sapiens
tgtgtatatgtgtgtgtgtgtgt

SEQ ID NO: 16027 - DNA, 21 bp, Homo sapiens
tgaatttgtgtgtgtgtgtgt

SEQ ID NO: 16028 - DNA, 25 bp, Homo sapiens
tatgcaagtttgtgtgtgtgtgtgt

SEQ ID NO: 16029 - DNA, 21 bp, Homo sapiens
tgtgtctgcgtgtgtgtgtgt

SEQ ID NO: 16030 - DNA, 25 bp, Homo sapiens
tgtgtctgcatttgtgtgtgtgtgt

SEQ ID NO: 16031 - DNA, 21 bp, Homo sapiens
tgtgcgtgcgtgtgtgtgtgt

SEQ ID NO: 16032 - DNA, 22 bp, Homo sapiens
cttgtgatatgtgtgtgtgtgt

SEQ ID NO: 16033 - DNA, 21 bp, Homo sapiens
tgtgtgtgtatgtgtgtgtgt

SEQ ID NO: 16034 - DNA, 23 bp, Homo sapiens
tgtgtctctgtgtgtgtgtgtgt

SEQ ID NO: 16035 - DNA, 18 bp, Homo sapiens
tgtgtgcgtgtgtgtgtg

SEQ ID NO: 16036 - DNA, 23 bp, Homo sapiens
tttggttttgtgtgtgggtgtgt

SEQ ID NO: 16037 - DNA, 22 bp, Homo sapiens
tctgtagtgtgtgtgtgtgtgt

SEQ ID NO: 16038 - DNA, 19 bp, Homo sapiens
tgtgcacgtgtgtgtgtgt

SEQ ID NO: 16039 - DNA, 22 bp, Homo sapiens
tttgtgcattttttgtgtgtgt

SEQ ID NO: 16040 - DNA, 21 bp, Homo sapiens
tgtgcatgtgtgtgtgtgtgt

SEQ ID NO: 16041 - DNA, 21 bp, Homo sapiens
tgtgtatgcatgtgtgtgtgt

SEQ ID NO: 16042 - DNA, 21 bp, Homo sapiens
tgtggctgtgtgtgtgtgtgt

SEQ ID NO: 16043 - DNA, 21 bp, Homo sapiens
tgtgcgcgcgtgtgtgtgtgt

SEQ ID NO: 16044 - DNA, 18 bp, Homo sapiens
tgtgagtgtgtgtgtgtg

SEQ ID NO: 16045 - DNA, 23 bp, Homo sapiens
tctgtgggtgtgtgtgtgtgtgt

SEQ ID NO: 16046 - DNA, 21 bp, Homo sapiens
tgtgtgtgcatatgtgtgtgt

SEQ ID NO: 16047 - DNA, 25 bp, Homo sapiens
ctgttgttttgtgtgtgtgtgtgta

SEQ ID NO: 16048 - DNA, 22 bp, Homo sapiens
tgtgtaaaatgtgtgtgtgtgt

SEQ ID NO: 16049 - DNA, 19 bp, Homo sapiens
tttgtgtgcgtgtgtgtgt

SEQ ID NO: 16050 - DNA, 19 bp, Homo sapiens
tgctgggctgtgtgtgtgt

SEQ ID NO: 16051 - DNA, 24 bp, Homo sapiens
taacacacgtatgtagatataatc

SEQ ID NO: 16052 - DNA, 20 bp, Homo sapiens
acatcattgtacctgtaatc

SEQ ID NO: 16053 - DNA, 18 bp, Homo sapiens
cacatctatatacataac

SEQ ID NO: 16054 - DNA, 16 bp, Homo sapiens
tgacccatgcctgtaa

SEQ ID NO: 16055 - DNA, 16 bp, Homo sapiens
acacacgcctgtaatc

SEQ ID NO: 16056 - DNA, 114 bp, Equine herpesvirus 1
gcgggcgtggggacccggggagagaccaccaggcctcgccggttttctctctctccgttgggggggggatggtagggattggtgggtgaggtggttgtggtagtcattgtgagt

SEQ ID NO: 16057 - DNA, 24 bp, Equine herpesvirus 1
ggggatggtagggattggtgggtg

SEQ ID NO: 16058 - DNA, 24 bp, Equine herpesvirus 1
gggcgtggggacccggggagagac

SEQ ID NO: 16059 - DNA, 16 bp, Homo sapiens
gggggtgagtgggggt

SEQ ID NO: 16060 - DNA, 22 bp, Homo sapiens
ggggactggtggggatggcggg

SEQ ID NO: 16061 - DNA, 18 bp, Homo sapiens
ggggagggtggggatgtg

SEQ ID NO: 16062 - DNA, 21 bp, Homo sapiens
ggggtggtgcgggggcaggtg

SEQ ID NO: 16063 - DNA, 18 bp, Homo sapiens
ggggtgtgggggttaatg

SEQ ID NO: 16064 - DNA, 18 bp, Homo sapiens
ggggtggggggattgggt

SEQ ID NO: 16065 - DNA, 22 bp, Homo sapiens
ggggtgctgggggagagtggtg

SEQ ID NO: 16066 - DNA, 24 bp, Homo sapiens
ggggataggtgggggaatgaggtg

SEQ ID NO: 16067 - DNA, 19 bp, Homo sapiens
ggggtggtaggaaggggtg

SEQ ID NO: 16068 - DNA, 20 bp, Homo sapiens
ggggtggtggggggcgggtg

SEQ ID NO: 16069 - DNA, 22 bp, Homo sapiens
ggggtgataggggagagaggtg

SEQ ID NO: 16070 - DNA, 16 bp, Homo sapiens
ggggatgggggggggg

SEQ ID NO: 16071 - DNA, 18 bp, Homo sapiens
ggggtggtggtggcaggt

SEQ ID NO: 16072 - DNA, 18 bp, Homo sapiens
ggggatggggggatggtg

SEQ ID NO: 16073 - DNA, 21 bp, Homo sapiens
ggggatggtaggaggtgggtg

SEQ ID NO: 16074 - DNA, 16 bp, Homo sapiens
ggggggtggggattga

SEQ ID NO: 16075 - DNA, 131 bp, Equine herpesvirus 1
tggtctcataaaaaaagttttacaaaaatatttttattctctttctctcttcaatggtctcacaaaaatattaaacctctttctgatggagtcgtaaaaatatttttattctctttctgatgtctcaacta

SEQ ID NO: 16076 - DNA, 24 bp, Equine herpesvirus 1
tgatggagtcgtaaaaatattttt

SEQ ID NO: 16077 - DNA, 21 bp, Homo sapiens
tggagttctaaaaatattttt

SEQ ID NO: 16078 - DNA, 19 bp, Homo sapiens
tgtggcataaaaatatttt

SEQ ID NO: 16079 - DNA, 22 bp, Homo sapiens
tgctggatcataaaatattttt

SEQ ID NO: 16080 - DNA, 123 bp, Equine herpesvirus 1
ccgagcgggggagagcggtaggggaaacgccgcctgggatgagtgggaccgagtagtgtgtgataggcactagagggcgccagcgtacaggggagtgtacccaccaaaactccaacaccacgg

SEQ ID NO: 16081 - DNA, 24 bp, Equine herpesvirus 1
tacaggggagtgtacccaccaaaa

SEQ ID NO: 16082 - DNA, 24 bp, Equine herpesvirus 1
aggggaaacgccgcctgggatgag

SEQ ID NO: 16083 - DNA, 19 bp, Homo sapiens
ggcagaagtgcccgccaaa

SEQ ID NO: 16084 - DNA, 17 bp, Homo sapiens
aggggagtcccgggcca

SEQ ID NO: 16085 - DNA, 16 bp, Homo sapiens
tacagggcggccacca

SEQ ID NO: 16086 - DNA, 23 bp, Homo sapiens
cagggagcgtgtgtgttcaccaa

SEQ ID NO: 16087 - DNA, 17 bp, Homo sapiens
tacagaggtgcaatcca

SEQ ID NO: 16088 - DNA, 17 bp, Homo sapiens
tacagggagcgagccac

SEQ ID NO: 16089 - DNA, 17 bp, Homo sapiens
aaggaatacttaccaaa

SEQ ID NO: 16090 - DNA, 18 bp, Homo sapiens
caggtgaaggtgttacca

SEQ ID NO: 16091 - DNA, 20 bp, Homo sapiens
cacagctcaggtacccgcca

SEQ ID NO: 16092 - DNA, 19 bp, Homo sapiens
gggaacgcgtgtgtccacc

SEQ ID NO: 16093 - DNA, 21 bp, Homo sapiens
taagggaacagtgcccaccaa

SEQ ID NO: 16094 - DNA, 18 bp, Homo sapiens
caggggagagggccacca

SEQ ID NO: 16095 - DNA, 17 bp, Homo sapiens
ggagaggtgtctaccaa

SEQ ID NO: 16096 - DNA, 18 bp, Homo sapiens
tacaggggaggaacagcc

SEQ ID NO: 16097 - DNA, 91 bp, Equine herpesvirus 1
tttttctttggtacaaaatttcacacaagtttttatacagacaaattcttgtccatatattttaaaacattgacttttgtactaagaaaaa

SEQ ID NO: 16098 - DNA, 24 bp, Equine herpesvirus 1
tctttggtacaaaatttcacacaa

SEQ ID NO: 16099 - DNA, 24 bp, Equine herpesvirus 1
tccatatattttaaaacattgact

SEQ ID NO: 16100 - DNA, 23 bp, Homo sapiens
tctttgtacaaaatattgtacaa

SEQ ID NO: 16101 - DNA, 15 bp, Homo sapiens
tctttggtagcacac

SEQ ID NO: 16102 - DNA, 18 bp, Homo sapiens
tctttggtacaaagctca

SEQ ID NO: 16103 - DNA, 18 bp, Homo sapiens
tctttggtataaaaatca

SEQ ID NO: 16104 - DNA, 18 bp, Homo sapiens
tctttgctagttcacaca

SEQ ID NO: 16105 - DNA, 22 bp, Homo sapiens
tttggcacaaagaaatatcaca

SEQ ID NO: 16106 - DNA, 18 bp, Homo sapiens
tctctggtatgaaccaca

SEQ ID NO: 16107 - DNA, 20 bp, Homo sapiens
tctttggtggaaaacacgca

SEQ ID NO: 16108 - DNA, 18 bp, Homo sapiens
gtacaaaatctgcacgca

SEQ ID NO: 16109 - DNA, 18 bp, Homo sapiens
tttggtacaaatgccaca

SEQ ID NO: 16110 - DNA, 18 bp, Homo sapiens
tttggacagaatttcaca

SEQ ID NO: 16111 - DNA, 21 bp, Homo sapiens
tccttggtgcaatccagtaca

SEQ ID NO: 16112 - DNA, 18 bp, Homo sapiens
cttgaaagatttcacaca

SEQ ID NO: 16113 - DNA, 16 bp, Homo sapiens
tttggtacaaccaaca

SEQ ID NO: 16114 - DNA, 18 bp, Homo sapiens
tctttggtatgaaaatca

SEQ ID NO: 16115 - DNA, 18 bp, Homo sapiens
tctttggtagcaaaattt

SEQ ID NO: 16116 - DNA, 20 bp, Homo sapiens
ccttttttaaatttcacaca

SEQ ID NO: 16117 - DNA, 82 bp, Equine herpesvirus 1
aaaatatttttattctctttctctcttcaatggtctcacaaaaatattaaacctctttctgatggagtcgtaaaaatatttt

SEQ ID NO: 16118 - DNA, 24 bp, Equine herpesvirus 1
aatatttttattctctttctctct

SEQ ID NO: 16119 - DNA, 20 bp, Equine herpesvirus 1
tggagtcgtaaaaatatttt

SEQ ID NO: 16120 - DNA, 20 bp, Homo sapiens
tggagttctaaaaatatttt

SEQ ID NO: 16121 - DNA, 17 bp, Homo sapiens
ggagttgtaaaacattt

SEQ ID NO: 16122 - DNA, 124 bp, Equine herpesvirus 1
tgggaagtacaatatgggggcaatgtaattgattgtaatgactctatgtgcagtaccagtgacgacacggtatccgctactcagattgttagacagctacaacacgcctccacgtcgaccccca

SEQ ID NO: 16123 - DNA, 24 bp, Equine herpesvirus 1
tcagattgttagacagctacaaca

SEQ ID NO: 16124 - DNA, 24 bp, Equine herpesvirus 1
tatgtgcagtaccagtgacgacac

SEQ ID NO: 16125 - DNA, 18 bp, Homo sapiens
tcagattggaggctacaa

SEQ ID NO: 16126 - DNA, 21 bp, Homo sapiens
tcacattgtattgagctacaa

SEQ ID NO: 16127 - DNA, 19 bp, Homo sapiens
tatgtacagtactgcagca

SEQ ID NO: 16128 - DNA, 19 bp, Homo sapiens
tgcgcagtgcgcgcgagac

SEQ ID NO: 16129 - DNA, 17 bp, Homo sapiens
atgtgcagtgtgtggcg

SEQ ID NO: 16130 - DNA, 22 bp, Homo sapiens
tgtgcagtattggaaaccaatg

SEQ ID NO: 16131 - DNA, 19 bp, Homo sapiens
tatgtgcactacctgaaga

SEQ ID NO: 16132 - DNA, 124 bp, Equine herpesvirus 1
acctctttctgatggagtcgtaaaatattttattctctttctctcttcaatggtctcacaaaaatattaaacctctttctgatggagtcgtaaaatattttattctctttctctcttcaatggt

SEQ ID NO: 16133 - DNA, 24 bp, Equine herpesvirus 1
tattttattctctttctctcttca

SEQ ID NO: 16134 - DNA, 24 bp, Equine herpesvirus 1
tgatggagtcgtaaaatattttat

SEQ ID NO: 16135 - DNA, 18 bp, Homo sapiens
cattttgttctcctcttc

SEQ ID NO: 16136 - DNA, 20 bp, Homo sapiens
tattctctgctctcttttca

SEQ ID NO: 16137 - DNA, 21 bp, Homo sapiens
ttctgttcttgctcctcttca

SEQ ID NO: 16138 - DNA, 22 bp, Homo sapiens
tattttcccccttttctttctt

SEQ ID NO: 16139 - DNA, 22 bp, Homo sapiens
tcttttcctttttttctcttca

SEQ ID NO: 16140 - DNA, 22 bp, Homo sapiens
ttttgttcagcttttctcttca

SEQ ID NO: 16141 - DNA, 25 bp, Homo sapiens
tattttttctcttcctcctttttca

SEQ ID NO: 16142 - DNA, 24 bp, Homo sapiens
tattttattttctcattttcttca

SEQ ID NO: 16143 - DNA, 18 bp, Homo sapiens
tttacaaaattctctctt

SEQ ID NO: 16144 - DNA, 24 bp, Homo sapiens
tattttattttttctttctctcct

SEQ ID NO: 16145 - DNA, 20 bp, Homo sapiens
ttttattttctctctttctt

SEQ ID NO: 16146 - DNA, 23 bp, Homo sapiens
tattttatgcttagaactcttca

SEQ ID NO: 16147 - DNA, 16 bp, Homo sapiens
ctttattttctctctt

SEQ ID NO: 16148 - DNA, 82 bp, Equine herpesvirus 1
ataaaaaagttttacaaaaatatttttattctctttctctcttcaatggtctcataaaaaagttttacaaaaatatttttat

SEQ ID NO: 16149 - DNA, 24 bp, Equine herpesvirus 1
tcataaaaaagttttacaaaaata

SEQ ID NO: 16150 - DNA, 24 bp, Equine herpesvirus 1
aaaagttttacaaaaatattttta

SEQ ID NO: 16151 - DNA, 23 bp, Homo sapiens
tcataaaagagctattttacaaa

SEQ ID NO: 16152 - DNA, 23 bp, Homo sapiens
tcatttcaaagttttataaaaat

SEQ ID NO: 16153 - DNA, 21 bp, Homo sapiens
taaaaaagacacacaaaaata

SEQ ID NO: 16154 - DNA, 22 bp, Homo sapiens
ataaaaaagccttataaaaata

SEQ ID NO: 16155 - DNA, 24 bp, Homo sapiens
tcataaagcaagtgaccaaaaata

SEQ ID NO: 16156 - DNA, 21 bp, Homo sapiens
aaaaagtcttgtacaaaaata

SEQ ID NO: 16157 - DNA, 23 bp, Homo sapiens
taaaaaagtaaaaaacaaaaata

SEQ ID NO: 16158 - DNA, 81 bp, Equine herpesvirus 1
aaaatatttttattctctttctctcttcaatggtctcacaaaaatattaaacctctttctgatggagtcgtaaaatatttt

SEQ ID NO: 16159 - DNA, 22 bp, Equine herpesvirus 1
tgatggagtcgtaaaatatttt

SEQ ID NO: 16160 - DNA, 16 bp, Homo sapiens
tatttttactctttcc

SEQ ID NO: 16161 - DNA, 24 bp, Homo sapiens
aatattttgtttgaatttctctct

SEQ ID NO: 16162 - DNA, 18 bp, Homo sapiens
ttcccactctctttttct

SEQ ID NO: 16163 - DNA, 20 bp, Homo sapiens
ggattttcaaccctctttct

SEQ ID NO: 16164 - DNA, 19 bp, Homo sapiens
atatttcttctttttctct

SEQ ID NO: 16165 - DNA, 24 bp, Homo sapiens
aatattttaattctcagactctct

SEQ ID NO: 16166 - DNA, 19 bp, Homo sapiens
attccttttctctttctct

SEQ ID NO: 16167 - DNA, 18 bp, Homo sapiens
ttctttcattttctctct

SEQ ID NO: 16168 - DNA, 109 bp, Equine herpesvirus 1
tacatatgcatgctttacacaccatacaataattactataatgtacagtacagtgtaacatacctgtgatgtgcatgttgttgtatttttgtatttttgtatttttgta

SEQ ID NO: 16169 - DNA, 24 bp, Equine herpesvirus 1
taatgtacagtacagtgtaacata

SEQ ID NO: 16170 - DNA, 24 bp, Equine herpesvirus 1
tgtgatgtgcatgttgttgtattt

SEQ ID NO: 16171 - DNA, 19 bp, Homo sapiens
taatgtacagaacaggata

SEQ ID NO: 16172 - DNA, 18 bp, Homo sapiens
tgtacagtacattctcat

SEQ ID NO: 16173 - DNA, 21 bp, Homo sapiens
tgtacagtatggacgccagtg

SEQ ID NO: 16174 - DNA, 20 bp, Homo sapiens
atgtacagtactgcagcata

SEQ ID NO: 16175 - DNA, 19 bp, Homo sapiens
taatgtacagatcaatgta

SEQ ID NO: 16176 - DNA, 20 bp, Homo sapiens
taatgtacactactgatata

SEQ ID NO: 16177 - DNA, 18 bp, Homo sapiens
taatgtacattacagtat

SEQ ID NO: 16178 - DNA, 22 bp, Homo sapiens
tacatgtgcagtgtacaacata

SEQ ID NO: 16179 - DNA, 23 bp, Homo sapiens
tgtgtatgtatagtgttgtattt

SEQ ID NO: 16180 - DNA, 22 bp, Homo sapiens
tgtgatgcgtgtgtgacactgt

SEQ ID NO: 16181 - DNA, 19 bp, Homo sapiens
tgtgtgtgtgtgttacatt

SEQ ID NO: 16182 - DNA, 20 bp, Homo sapiens
tgtgagtgtgtgtgtgtgtt

SEQ ID NO: 16183 - DNA, 18 bp, Homo sapiens
tgtgtgtgtgtgttgtgt

SEQ ID NO: 16184 - DNA, 82 bp, Equine herpesvirus 1
aaaatatttttattctctttctcgcttcaatggtctcacaaaaatattaaacctctttctgatggagtcgtaaaaatatttt

SEQ ID NO: 16185 - DNA, 24 bp, Equine herpesvirus 1
aatatttttattctctttctcgct

SEQ ID NO: 16186 - DNA, 21 bp, Homo sapiens
aatattttctcttttcttgct

SEQ ID NO: 16187 - DNA, 19 bp, Homo sapiens
aatattttcatttccttct

SEQ ID NO: 16188 - DNA, 123 bp, Equine herpesvirus 1
ccgtggtgttggagttttggtgggtacactcccctgtacgctggcgccctctagtgcctatcacacactactcggtcccactcatcccaggcggcgtttcccctaccgctctcccccgctcgg

SEQ ID NO: 16189 - DNA, 24 bp, Equine herpesvirus 1
tcggtcccactcatcccaggcggc

SEQ ID NO: 16190 - DNA, 24 bp, Equine herpesvirus 1
ttggagttttggtgggtacactcc

SEQ ID NO: 16191 - DNA, 20 bp, Homo sapiens
gtcatctcatcccaggtggc

SEQ ID NO: 16192 - DNA, 17 bp, Homo sapiens
tcggtcccgtccggacg

SEQ ID NO: 16193 - DNA, 19 bp, Homo sapiens
ggccccactcgcccgcggc

SEQ ID NO: 16194 - DNA, 27 bp, Homo sapiens
tcggtcccgcctcaagcaccgggtggc

SEQ ID NO: 16195 - DNA, 16 bp, Homo sapiens
tcggctcttccaggcg

SEQ ID NO: 16196 - DNA, 128 bp, Equine herpesvirus 1
gaattattattattcttattattcttattccacgagagtatgagctcgtctgtaagagcctgaacgatgattattcttatttcacgagagtatgagctcgtctgtaagagcctgaacgatgattattc

SEQ ID NO: 16197 - DNA, 24 bp, Equine herpesvirus 1
tgagctcgtctgtaagagcctgaa

SEQ ID NO: 16198 - DNA, 24 bp, Equine herpesvirus 1
tattattcttattccacgagagta

SEQ ID NO: 16199 - DNA, 26 bp, Homo sapiens
tgagctcgtcctgcgtcttgagcttg

SEQ ID NO: 16200 - DNA, 18 bp, Homo sapiens
agctacttgggagcctga

SEQ ID NO: 16201 - DNA, 18 bp, Homo sapiens
tgggccgggggagcctga

SEQ ID NO: 16202 - DNA, 16 bp, Homo sapiens
tgagctcggtggcttg

SEQ ID NO: 16203 - DNA, 18 bp, Homo sapiens
tggctctcaaagagcctg

SEQ ID NO: 16204 - DNA, 19 bp, Homo sapiens
tgacttgtcaacagcctga

SEQ ID NO: 16205 - DNA, 16 bp, Homo sapiens
tgagcccaggagtctg

SEQ ID NO: 16206 - DNA, 16 bp, Homo sapiens
gctcgcaggagcctga

SEQ ID NO: 16207 - DNA, 18 bp, Homo sapiens
tcatctgtaagccacctg

SEQ ID NO: 16208 - DNA, 20 bp, Homo sapiens
tgagtccagtaagagcttga

SEQ ID NO: 16209 - DNA, 106 bp, Equine herpesvirus 1
gcgggctggtcatcggcattctggcgcaccggtgcgcgctcctccccttggtcttcccggcaaccccgcgcacggccgcgtgcggcgtgccgtgggacgagcccgc

SEQ ID NO: 16210 - DNA, 24 bp, Equine herpesvirus 1
tctggcgcaccggtgcgcgctcct

SEQ ID NO: 16211 - DNA, 24 bp, Equine herpesvirus 1
cggcaaccccgcgcacggccgcgt

SEQ ID NO: 16212 - DNA, 24 bp, Homo sapiens
tctggccacggcccgcgcgctcct

SEQ ID NO: 16213 - DNA, 21 bp, Homo sapiens
tctgcgctttggtgcgctcct

SEQ ID NO: 16214 - DNA, 17 bp, Homo sapiens
tctgcgcacctgcttct

SEQ ID NO: 16215 - DNA, 19 bp, Homo sapiens
cggaactcggccggccgcg

SEQ ID NO: 16216 - DNA, 26 bp, Homo sapiens
cgggaccccgcgcctccgggccgcgt

SEQ ID NO: 16217 - DNA, 23 bp, Homo sapiens
cggccgcgaattcgcggccgcgt

SEQ ID NO: 16218 - DNA, 20 bp, Homo sapiens
gccggccgctgtggccgcgt

SEQ ID NO: 16219 - DNA, 19 bp, Homo sapiens
ggccgccccgcgcagaccg

SEQ ID NO: 16220 - DNA, 19 bp, Homo sapiens
ggctcctcacaggccgcgt

SEQ ID NO: 16221 - DNA, 21 bp, Homo sapiens
cggctcccggggcggccgcgt

SEQ ID NO: 16222 - DNA, 22 bp, Homo sapiens
cggccaccccgcgaccccgcgt

SEQ ID NO: 16223 - DNA, 73 bp, Fowlpox virus
tattcttatttcatgagagtatgagctcgtctgtgagagcctgaacgatgattattcttatttcatgagagta

SEQ ID NO: 16224 - DNA, 24 bp, Fowlpox virus
ttcatgagagtatgagctcgtctg

SEQ ID NO: 16225 - DNA, 24 bp, Fowlpox virus
tgattattcttatttcatgagagt

SEQ ID NO: 16226 - DNA, 15 bp, Homo sapiens
tgagagtacatgtct

SEQ ID NO: 16227 - DNA, 81 bp, Fowlpox virus
ccgtgatcgatcccctcccgcccggtggccccgaaacgagggtcgatttcaacggacgccccgggaggaaaaaatgcacgg

SEQ ID NO: 16228 - DNA, 24 bp, Fowlpox virus
tttcaacggacgccccgggaggaa

SEQ ID NO: 16229 - DNA, 24 bp, Fowlpox virus
gcccggtggccccgaaacgagggt

SEQ ID NO: 16230 - DNA, 16 bp, Homo sapiens
ttccaaccccgggggg

SEQ ID NO: 16231 - DNA, 18 bp, Homo sapiens
tttcaacggttgctggag

SEQ ID NO: 16232 - DNA, 16 bp, Homo sapiens
caaggtcccgggagga

SEQ ID NO: 16233 - DNA, 17 bp, Homo sapiens
tttcaacggattccggg

SEQ ID NO: 16234 - DNA, 88 bp, Fowlpox virus
tattcttatttcatgagagtatgagctagtctgtgagagcctgaacggtgatcattcttattatcattattcttatttcatgagagta

SEQ ID NO: 16235 - DNA, 24 bp, Fowlpox virus
tgatcattcttattatcattattc

SEQ ID NO: 16236 - DNA, 24 bp, Fowlpox virus
ttcatgagagtatgagctagtctg

SEQ ID NO: 16237 - DNA, 18 bp, Homo sapiens
cattcttccgtcattatt

SEQ ID NO: 16238 - DNA, 69 bp, Cowpox virus
atgaagttaatgatacacactacactgtcgaatttgatagggacaaagtagttgacgcgtttatttcat

SEQ ID NO: 16239 - DNA, 24 bp, Cowpox virus
ttaatgatacacactacactgtcg

SEQ ID NO: 16240 - DNA, 24 bp, Cowpox virus
caaagtagttgacgcgtttatttc

SEQ ID NO: 16241 - DNA, 18 bp, Homo sapiens
ctaatgatacatgctaca

SEQ ID NO: 16242 - DNA, 18 bp, Homo sapiens
ttaatgatacaatactgc

SEQ ID NO: 16243 - DNA, 88 bp, Cowpox virus
tggccttccagatgctaacttttatgaccctaacacacagcgccttgtgtgggcctgtttaggcgtggaggtggggcgtggacagcca

SEQ ID NO: 16244 - DNA, 24 bp, Cowpox virus
taacttttatgaccctaacacaca

SEQ ID NO: 16245 - DNA, 24 bp, Cowpox virus
cgtggaggtggggcgtggacagcc

SEQ ID NO: 16246 - DNA, 20 bp, Homo sapiens
ttttattttcttaacacaca

SEQ ID NO: 16247 - DNA, 19 bp, Homo sapiens
acttttatggagacacaca

SEQ ID NO: 16248 - DNA, 21 bp, Homo sapiens
cttttatgtgtagcctgacac

SEQ ID NO: 16249 - DNA, 17 bp, Homo sapiens
taacctttatgacctaa

SEQ ID NO: 16250 - DNA, 14 bp, Homo sapiens
acttttctaacaca

SEQ ID NO: 16251 - DNA, 19 bp, Homo sapiens
cttttataatcttcacaca

SEQ ID NO: 16252 - DNA, 18 bp, Homo sapiens
ttttatgaccttaagaca

SEQ ID NO: 16253 - DNA, 20 bp, Homo sapiens
ttttaataccctaacataca

SEQ ID NO: 16254 - DNA, 19 bp, Homo sapiens
ttttacacattaacacaca

SEQ ID NO: 16255 - DNA, 20 bp, Homo sapiens
ttttataattttctaacaca

SEQ ID NO: 16256 - DNA, 19 bp, Homo sapiens
taactttatgacttccaca

SEQ ID NO: 16257 - DNA, 21 bp, Homo sapiens
taacatttatgactccaaaca

SEQ ID NO: 16258 - DNA, 23 bp, Homo sapiens
cgtggaggggcccagggatggcc

SEQ ID NO: 16259 - DNA, 19 bp, Homo sapiens
gaagggggcgtgggcagcc

SEQ ID NO: 16260 - DNA, 25 bp, Homo sapiens
tgggggtgggggtggaggggtggcc

SEQ ID NO: 16261 - DNA, 21 bp, Homo sapiens
ggaggtggggcacctgtagcc

SEQ ID NO: 16262 - DNA, 23 bp, Homo sapiens
cctggagcgcagcgtgggcggcc

SEQ ID NO: 16263 - DNA, 23 bp, Homo sapiens
cgggaggtggggcagcgaggcag

SEQ ID NO: 16264 - DNA, 19 bp, Homo sapiens
gtgggggtgggtgctcatg

SEQ ID NO: 16265 - DNA, 23 bp, Homo sapiens
gtggagatgaattatgggcagcc

SEQ ID NO: 16266 - DNA, 17 bp, Homo sapiens
gtggaggtggggcgagc

SEQ ID NO: 16267 - DNA, 25 bp, Homo sapiens
cgtggaggatggaacacggacggcc

SEQ ID NO: 16268 - DNA, 18 bp, Homo sapiens
cgtggtggtgggcgcctg

SEQ ID NO: 16269 - DNA, 16 bp, Homo sapiens
cggggaggtggggtgg

SEQ ID NO: 16270 - DNA, 18 bp, Homo sapiens
cgtgcaggtggggcttgg

SEQ ID NO: 16271 - DNA, 19 bp, Homo sapiens
gtgggggtggggctggagc

SEQ ID NO: 16272 - DNA, 19 bp, Homo sapiens
gtggaggtggggacgatgg

SEQ ID NO: 16273 - DNA, 21 bp, Homo sapiens
cgtggggttggaaggacagcc

SEQ ID NO: 16274 - DNA, 22 bp, Homo sapiens
cgtggtggtggggcgcccgcag

SEQ ID NO: 16275 - DNA, 15 bp, Homo sapiens
cgcggaggggtggac

SEQ ID NO: 16276 - DNA, 21 bp, Homo sapiens
cgtggggtggggcggggagcc

SEQ ID NO: 16277 - DNA, 25 bp, Homo sapiens
gtgggggtggggcacctccatggcc

SEQ ID NO: 16278 - DNA, 19 bp, Homo sapiens
gtgcaggtggggcacgagc

SEQ ID NO: 16279 - DNA, 22 bp, Homo sapiens
cgtgaaggcccctggtgggcgg

SEQ ID NO: 16280 - DNA, 18 bp, Homo sapiens
cctggaggtggggtgagc

SEQ ID NO: 16281 - DNA, 27 bp, Homo sapiens
cgtggggatggtaggaggtgggtggcc

SEQ ID NO: 16282 - DNA, 20 bp, Homo sapiens
cctggaggtgggcgggaggc

SEQ ID NO: 16283 - DNA, 19 bp, Homo sapiens
cgtgaggtggcctggcggc

SEQ ID NO: 16284 - DNA, 21 bp, Homo sapiens
gtgggcgtggagccggcagcc

SEQ ID NO: 16285 - DNA, 22 bp, Homo sapiens
catgggggtggggctcctgtgg

SEQ ID NO: 16286 - DNA, 18 bp, Homo sapiens
cgtggtggtgggcacctg

SEQ ID NO: 16287 - DNA, 63 bp, Cowpox virus
cctccacagttactacaccatataataatgagagttttaaagagtacctgcgacatgtggagg

SEQ ID NO: 16288 - DNA, 24 bp, Cowpox virus
tccacagttactacaccatataat

SEQ ID NO: 16289 - DNA, 24 bp, Cowpox virus
tttaaagagtacctgcgacatgtg

SEQ ID NO: 16290 - DNA, 18 bp, Homo sapiens
gctaccatgtcatataat

SEQ ID NO: 16291 - DNA, 21 bp, Homo sapiens
cagtagctcctgccatataat

SEQ ID NO: 16292 - DNA, 18 bp, Homo sapiens
tccacatcaaccatataa

SEQ ID NO: 16293 - DNA, 109 bp, Cowpox virus
taagggcagggaggagatacgtatgcaaaagcgggggggactgcggtcaacaataagtaaaaacccgcccgccacatctttcgccacaatcggcctccagaggctttta

SEQ ID NO: 16294 - DNA, 24 bp, Cowpox virus
tgcaaaagcgggggggactgcggt

SEQ ID NO: 16295 - DNA, 24 bp, Cowpox virus
aaaacccgcccgccacatctttcg

SEQ ID NO: 16296 - DNA, 18 bp, Homo sapiens
tgcaagagcgggggcagg

SEQ ID NO: 16297 - DNA, 19 bp, Homo sapiens
gcagaaggcgggctgtggt

SEQ ID NO: 16298 - DNA, 18 bp, Homo sapiens
agcgggagtgggggcagc

SEQ ID NO: 16299 - DNA, 20 bp, Homo sapiens
gcagaggcggctactgcggt

SEQ ID NO: 16300 - DNA, 18 bp, Homo sapiens
gcagcctggggactgtgg

SEQ ID NO: 16301 - DNA, 21 bp, Homo sapiens
tgcaagagaggggagggtggt

SEQ ID NO: 16302 - DNA, 19 bp, Homo sapiens
tgtaagagtggagggaagg

SEQ ID NO: 16303 - DNA, 21 bp, Homo sapiens
tgcggcgggcgggactgcggt

SEQ ID NO: 16304 - DNA, 18 bp, Homo sapiens
cgcccgccgggtcactcg

SEQ ID NO: 16305 - DNA, 18 bp, Homo sapiens
ggaacccgcccgcgcctc

SEQ ID NO: 16306 - DNA, 19 bp, Homo sapiens
aaacccgctggccattcac

SEQ ID NO: 16307 - DNA, 23 bp, Homo sapiens
aaaacccccccgccactgaatcg

SEQ ID NO: 16308 - DNA, 63 bp, Cowpox virus
taacgttgcttatatttatgttgttgtacccagtgtgcatgatttatgtatgtgtgcatgttg

SEQ ID NO: 16309 - DNA, 24 bp, Cowpox virus
acgttgcttatatttatgttgttg

SEQ ID NO: 16310 - DNA, 22 bp, Cowpox virus
atttatgtatgtgtgcatgttg

SEQ ID NO: 16311 - DNA, 14 bp, Homo sapiens
gttgctatgttgcc

SEQ ID NO: 16312 - DNA, 21 bp, Homo sapiens
gttgcttatgtataatcactg

SEQ ID NO: 16313 - DNA, 18 bp, Homo sapiens
ttatgtatgtgtgtctat

SEQ ID NO: 16314 - DNA, 18 bp, Homo sapiens
atttatgcatgtgatatt

SEQ ID NO: 16315 - DNA, 21 bp, Homo sapiens
atttgcgtgtgtgtgcgtgct

SEQ ID NO: 16316 - DNA, 18 bp, Homo sapiens
tatgtgtgtgtgcatgtt

SEQ ID NO: 16317 - DNA, 22 bp, Homo sapiens
atctgtgtatgtgagcatgttg

SEQ ID NO: 16318 - DNA, 19 bp, Homo sapiens
atatatgtgtgtgtctgct

SEQ ID NO: 16319 - DNA, 20 bp, Homo sapiens
atttgtgtgtgtgtgcacat

SEQ ID NO: 16320 - DNA, 18 bp, Homo sapiens
ttcatgtgtgtgtctatg

SEQ ID NO: 16321 - DNA, 16 bp, Homo sapiens
tatgtgtgtgtgtgct

SEQ ID NO: 16322 - DNA, 21 bp, Homo sapiens
atttatgtgtatgtgtacatg

SEQ ID NO: 16323 - DNA, 18 bp, Homo sapiens
tttgtgtgtgtgcgcacg

SEQ ID NO: 16324 - DNA, 21 bp, Homo sapiens
tacatatgtgtgtgtgtgttg

SEQ ID NO: 16325 - DNA, 20 bp, Homo sapiens
cttatgtatagtaagtgttg

SEQ ID NO: 16326 - DNA, 66 bp, Cowpox virus
caaaaccacaacactgctaatcctctggcttcctgcctctcctactgctgcatacctgtggttgtg

SEQ ID NO: 16327 - DNA, 24 bp, Cowpox virus
aaccacaacactgctaatcctctg

SEQ ID NO: 16328 - DNA, 24 bp, Cowpox virus
tcctactgctgcatacctgtggtt

SEQ ID NO: 16329 - DNA, 19 bp, Homo sapiens
aacactgctaaacaggctg

SEQ ID NO: 16330 - DNA, 23 bp, Homo sapiens
aaccaggataattaaatcctctg

SEQ ID NO: 16331 - DNA, 18 bp, Homo sapiens
cagcactgtgatcctctg

SEQ ID NO: 16332 - DNA, 21 bp, Homo sapiens
cctccacttgctgatcctctg

SEQ ID NO: 16333 - DNA, 20 bp, Homo sapiens
cacagaaaaggcatcctctg

SEQ ID NO: 16334 - DNA, 18 bp, Homo sapiens
aacactgcctcccttctg

SEQ ID NO: 16335 - DNA, 20 bp, Homo sapiens
aaccatacactgccacccct

SEQ ID NO: 16336 - DNA, 21 bp, Homo sapiens
catcacagtactaaccctctg

SEQ ID NO: 16337 - DNA, 20 bp, Homo sapiens
ccagggctgcagatcctctg

SEQ ID NO: 16338 - DNA, 18 bp, Homo sapiens
aaccatgatactactaat

SEQ ID NO: 16339 - DNA, 23 bp, Homo sapiens
aaccacaaataaaatcttctctg

SEQ ID NO: 16340 - DNA, 20 bp, Homo sapiens
aaccacaagctgacaattct

SEQ ID NO: 16341 - DNA, 24 bp, Homo sapiens
cacaacactgtttaatcagctctg

SEQ ID NO: 16342 - DNA, 27 bp, Homo sapiens
aaccactaatgctgctattcaaatctg

SEQ ID NO: 16343 - DNA, 22 bp, Homo sapiens
ccctcagtgtgtgcctgtggtt

SEQ ID NO: 16344 - DNA, 21 bp, Homo sapiens
ctgccccaaatacctgtggtt

SEQ ID NO: 16345 - DNA, 19 bp, Homo sapiens
ctattgctgcataacaagt

SEQ ID NO: 16346 - DNA, 16 bp, Homo sapiens
ctatggaacctgtggt

SEQ ID NO: 16347 - DNA, 23 bp, Homo sapiens
ctatgcttgtcgtgcctgtggtt

SEQ ID NO: 16348 - DNA, 20 bp, Homo sapiens
cttcttgctctgctgtggtt

SEQ ID NO: 16349 - DNA, 27 bp, Homo sapiens
tcttactgctgtgaatttaaccacagg

SEQ ID NO: 16350 - DNA, 20 bp, Homo sapiens
tcctactgctgctgccaagc

SEQ ID NO: 16351 - DNA, 67 bp, Cowpox virus
ctgaaatacccgtaaacggggatgtataaacgcaaaatgcccgtccctcccgaatggcgtatattag

SEQ ID NO: 16352 - DNA, 24 bp, Cowpox virus
tacccgtaaacggggatgtataaa

SEQ ID NO: 16353 - DNA, 24 bp, Cowpox virus
cccgtccctcccgaatggcgtata

SEQ ID NO: 16354 - DNA, 18 bp, Homo sapiens
tactgtaaacaaagtgta

SEQ ID NO: 16355 - DNA, 19 bp, Homo sapiens
cacctgtgggtatgtataa

SEQ ID NO: 16356 - DNA, 18 bp, Homo sapiens
gtccctcctgaaagagta

SEQ ID NO: 16357 - DNA, 20 bp, Homo sapiens
cgtccctctccaagttacat

SEQ ID NO: 16358 - DNA, 19 bp, Homo sapiens
cctgtccctttttggcata

SEQ ID NO: 16359 - DNA, 19 bp, Homo sapiens
cctgcttttctgaatggca

SEQ ID NO: 16360 - DNA, 15 bp, Homo sapiens
cccgtccctctgggt

SEQ ID NO: 16361 - DNA, 18 bp, Homo sapiens
ccgtccctcttgaaaatg

SEQ ID NO: 16362 - DNA, 21 bp, Homo sapiens
cccgtcccgctcggatgggca

SEQ ID NO: 16363 - DNA, 95 bp, Cowpox virus
aatccaaccctctttgtacaaaatgcttttggcagtacatttctaagagttactcatgctaattgcatagttggccacaatttcagggttggatt

SEQ ID NO: 16364 - DNA, 24 bp, Cowpox virus
ttgcatagttggccacaatttcag

SEQ ID NO: 16365 - DNA, 24 bp, Cowpox virus
tacaaaatgcttttggcagtacat

SEQ ID NO: 16366 - DNA, 20 bp, Homo sapiens
tgcatccgccatcacaattt

SEQ ID NO: 16367 - DNA, 22 bp, Homo sapiens
ttacataggcatgtgatttcag

SEQ ID NO: 16368 - DNA, 21 bp, Homo sapiens
ttgcatagttagtcacacctc

SEQ ID NO: 16369 - DNA, 19 bp, Homo sapiens
tacaaaatgcttcttgtac

SEQ ID NO: 16370 - DNA, 23 bp, Homo sapiens
acaaaatgcttttcaaaatacat

SEQ ID NO: 16371 - DNA, 17 bp, Homo sapiens
caaaattcttttggaat

SEQ ID NO: 16372 - DNA, 96 bp, Simian T-lymphotropic virus 1
tgggcatatgtttttatgcaggtgtttgcaatatattttgttggcgtgtagcccttattgtataagccaagtatctgtcttgcaaatatgtaacca

SEQ ID NO: 16373 - DNA, 24 bp, Simian T-lymphotropic virus 1
taagccaagtatctgtcttgcaaa

SEQ ID NO: 16374 - DNA, 24 bp, Simian T-lymphotropic virus 1
tttatgcaggtgtttgcaatatat

SEQ ID NO: 16375 - DNA, 17 bp, Homo sapiens
agcaagagttcttgcaa

SEQ ID NO: 16376 - DNA, 17 bp, Homo sapiens
gcctgtgctgtcttgca

SEQ ID NO: 16377 - DNA, 18 bp, Homo sapiens
aagccgctttgtcttgca

SEQ ID NO: 16378 - DNA, 16 bp, Homo sapiens
gccaagggatcttgca

SEQ ID NO: 16379 - DNA, 21 bp, Homo sapiens
agccaagtgtttgccccataa

SEQ ID NO: 16380 - DNA, 17 bp, Homo sapiens
agctgcacagtcttgca

SEQ ID NO: 16381 - DNA, 20 bp, Homo sapiens
agctggctgagtcttgcaaa

SEQ ID NO: 16382 - DNA, 16 bp, Homo sapiens
tgaccactgtcttgca

SEQ ID NO: 16383 - DNA, 20 bp, Homo sapiens
caagtatcttgttccccaaa

SEQ ID NO: 16384 - DNA, 19 bp, Homo sapiens
aagtcagtcagtcttgcaa

SEQ ID NO: 16385 - DNA, 16 bp, Homo sapiens
agccaaaggtcttgca

SEQ ID NO: 16386 - DNA, 23 bp, Homo sapiens
taagttaatatctgctccccaaa

SEQ ID NO: 16387 - DNA, 18 bp, Homo sapiens
taagccaagttatttcac

SEQ ID NO: 16388 - DNA, 67 bp, Simian T-lymphotropic virus 1
tggtctgtgttaaatcccttctatattattattgatgtattgttgtagaaaactattacttagacca

SEQ ID NO: 16389 - DNA, 24 bp, Simian T-lymphotropic virus 1
cccttctatattattattgatgta

SEQ ID NO: 16390 - DNA, 24 bp, Simian T-lymphotropic virus 1
tgtagaaaactattacttagacca

SEQ ID NO: 16391 - DNA, 17 bp, Homo sapiens
cttctacatggtgatgt

SEQ ID NO: 16392 - DNA, 21 bp, Homo sapiens
cccttctatttgttattcttg

SEQ ID NO: 16393 - DNA, 21 bp, Homo sapiens
tgtagaaaacgtcttagatca

SEQ ID NO: 16394 - DNA, 20 bp, Homo sapiens
tgtagaaaatataaatagac

SEQ ID NO: 16395 - DNA, 21 bp, Homo sapiens
tgtagaaaaatatctcaggcc

SEQ ID NO: 16396 - DNA, 15 bp, Homo sapiens
gtagaaaactaacca

SEQ ID NO: 16397 - DNA, 94 bp, Simian T-lymphotropic virus 1
aagtttggccttcctgatccatctttctataatcctgaccaggaacgtttggtatgggcctgtgtaggtttggaggtaggccgaggtcaacctt

SEQ ID NO: 16398 - DNA, 24 bp, Simian T-lymphotropic virus 1
tctttctataatcctgaccaggaa

SEQ ID NO: 16399 - DNA, 24 bp, Simian T-lymphotropic virus 1
tgtgtaggtttggaggtaggccga

SEQ ID NO: 16400 - DNA, 18 bp, Homo sapiens
tttctttgttgaccagga

SEQ ID NO: 16401 - DNA, 18 bp, Homo sapiens
ttctataatcctaaagaa

SEQ ID NO: 16402 - DNA, 19 bp, Homo sapiens
tttctatgatcctgaccaa

SEQ ID NO: 16403 - DNA, 63 bp, Periplaneta fuliginosa densovirus
gcagaaggtagctccctcgactgggtgacaagaagaaaccattcaggaagtgcttccttctgc

SEQ ID NO: 16404 - DNA, 24 bp, Periplaneta fuliginosa densovirus
gaaggtagctccctcgactgggtg

SEQ ID NO: 16405 - DNA, 21 bp, Periplaneta fuliginosa densovirus
tcaggaagtgcttccttctgc

SEQ ID NO: 16406 - DNA, 22 bp, Homo sapiens
aggtggctttggtgactgggtg

SEQ ID NO: 16407 - DNA, 17 bp, Homo sapiens
aggtggccccctctctg

SEQ ID NO: 16408 - DNA, 14 bp, Homo sapiens
tcaggttccttctg

SEQ ID NO: 16409 - DNA, 16 bp, Homo sapiens
aggatctaccttctgc

SEQ ID NO: 16410 - DNA, 21 bp, Homo sapiens
caggaagcagatatctttctg

SEQ ID NO: 16411 - DNA, 14 bp, Homo sapiens
caggaagtattctg

SEQ ID NO: 16412 - DNA, 18 bp, Homo sapiens
tcgtgaagtcccttctgc

SEQ ID NO: 16413 - DNA, 17 bp, Homo sapiens
tcagaaagtgttcttct

SEQ ID NO: 16414 - DNA, 18 bp, Homo sapiens
tcagaaagcgttcttctg

SEQ ID NO: 16415 - DNA, 15 bp, Homo sapiens
caggaagtgtttctg

SEQ ID NO: 16416 - DNA, 18 bp, Homo sapiens
tcaggaagggagctctgc

SEQ ID NO: 16417 - DNA, 16 bp, Homo sapiens
tcaggaaggccccttg

SEQ ID NO: 16418 - DNA, 19 bp, Homo sapiens
tcgggaaatgctgggctgc

SEQ ID NO: 16419 - DNA, 15 bp, Homo sapiens
agaaaggtccttctg

SEQ ID NO: 16420 - DNA, 18 bp, Homo sapiens
tcagaaatttccttctgc

SEQ ID NO: 16421 - DNA, 15 bp, Homo sapiens
caggaggtccttctg

SEQ ID NO: 16422 - DNA, 18 bp, Homo sapiens
ccagactcttccttttgc

SEQ ID NO: 16423 - DNA, 18 bp, Homo sapiens
tcaggaggttcttcgctg

SEQ ID NO: 16424 - DNA, 19 bp, Homo sapiens
tcaagggctggtccttctg

SEQ ID NO: 16425 - DNA, 20 bp, Homo sapiens
tcacacctgcttccttctgc

SEQ ID NO: 16426 - DNA, 15 bp, Homo sapiens
ggaaatgccttttgc

SEQ ID NO: 16427 - DNA, 18 bp, Homo sapiens
ggaagtgctcctcttttg

SEQ ID NO: 16428 - DNA, 16 bp, Homo sapiens
tcaggaagtggccctg

SEQ ID NO: 16429 - DNA, 20 bp, Homo sapiens
tcatgaccttattccttctg

SEQ ID NO: 16430 - DNA, 17 bp, Homo sapiens
caggccgttccttctgc

SEQ ID NO: 16431 - DNA, 18 bp, Homo sapiens
cagggaacccccttctgc

SEQ ID NO: 16432 - DNA, 16 bp, Homo sapiens
tcagaaaacctttctg

SEQ ID NO: 16433 - DNA, 15 bp, Homo sapiens
tcaggaagtggtctg

SEQ ID NO: 16434 - DNA, 15 bp, Homo sapiens
tcaagaaatcttctg

SEQ ID NO: 16435 - DNA, 19 bp, Homo sapiens
tcaggaaggtgggccttgc

SEQ ID NO: 16436 - DNA, 20 bp, Homo sapiens
caggaagtcaagagttctgc

SEQ ID NO: 16437 - DNA, 20 bp, Homo sapiens
tcaggaaatgctggggatgc

SEQ ID NO: 16438 - DNA, 18 bp, Homo sapiens
tcaaggagcaccttctgc

SEQ ID NO: 16439 - DNA, 21 bp, Homo sapiens
tcagtgaggcagtccttctgc

SEQ ID NO: 16440 - DNA, 20 bp, Homo sapiens
tcaggaagggcgctggtctg

SEQ ID NO: 16441 - DNA, 19 bp, Homo sapiens
tcagaaagcatgctttctg

SEQ ID NO: 16442 - DNA, 17 bp, Homo sapiens
ggcagttccccttctgc

SEQ ID NO: 16443 - DNA, 21 bp, Homo sapiens
tcaggaagtccaggaggctgc

SEQ ID NO: 16444 - DNA, 20 bp, Homo sapiens
tcagcaggtgttcccgttgc

SEQ ID NO: 16445 - DNA, 94 bp, Periplaneta fuliginosa densovirus
gttcgtgcgccaggcctgcaagatctccaacgtggagctgaccaacctggtctcgtacatgggcatcttgcacgagaaccgcctggggcagaac

SEQ ID NO: 16446 - DNA, 24 bp, Periplaneta fuliginosa densovirus
gtacatgggcatcttgcacgagaa

SEQ ID NO: 16447 - DNA, 24 bp, Periplaneta fuliginosa densovirus
tgcaagatctccaacgtggagctg

SEQ ID NO: 16448 - DNA, 17 bp, Homo sapiens
tgggccacacacgagaa

SEQ ID NO: 16449 - DNA, 21 bp, Homo sapiens
gcacatgggtgttgcaagaga

SEQ ID NO: 16450 - DNA, 24 bp, Homo sapiens
gtacatggcatcagatggtgagaa

SEQ ID NO: 16451 - DNA, 24 bp, Homo sapiens
gtacataggcatgcaacatgggag

SEQ ID NO: 16452 - DNA, 24 bp, Homo sapiens
tgtaagatctcttcgagagagctg

SEQ ID NO: 16453 - DNA, 23 bp, Homo sapiens
caggatctccaggtgcgtagctg

SEQ ID NO: 16454 - DNA, 22 bp, Homo sapiens
gcaagatttctggttagagctg

SEQ ID NO: 16455 - DNA, 75 bp, Periplaneta fuliginosa densovirus
agatctattatgtctgttatttgagattcttcatcactacttaatggcattatctcgtcacaatgtaaccaatct

SEQ ID NO: 16456 - DNA, 24 bp, Periplaneta fuliginosa densovirus
tattatgtctgttatttgagattc

SEQ ID NO: 16457 - DNA, 18 bp, Periplaneta fuliginosa densovirus
tcacaatgtaaccaatct

SEQ ID NO: 16458 - DNA, 19 bp, Homo sapiens
ttatgcctgttatgacact

SEQ ID NO: 16459 - DNA, 20 bp, Homo sapiens
tatcaacttgtttgagattc

SEQ ID NO: 16460 - DNA, 17 bp, Homo sapiens
tcacaatgttaaaatcc

SEQ ID NO: 16461 - DNA, 15 bp, Homo sapiens
tcacaatgtatatct

SEQ ID NO: 16462 - DNA, 17 bp, Homo sapiens
tcagaagcaaccaatct

SEQ ID NO: 16463 - DNA, 20 bp, Homo sapiens
cacaatgtagggctcaatct

SEQ ID NO: 16464 - DNA, 18 bp, Homo sapiens
cacaacatggaccaatct

SEQ ID NO: 16465 - DNA, 17 bp, Homo sapiens
ccacagggaaccaatct

SEQ ID NO: 16466 - DNA, 16 bp, Homo sapiens
tcacaatgccccgtct

SEQ ID NO: 16467 - DNA, 18 bp, Homo sapiens
cacaatgcccattaatct

SEQ ID NO: 16468 - DNA, 18 bp, Homo sapiens
acatatgaaaaccaatct

SEQ ID NO: 16469 - DNA, 18 bp, Homo sapiens
cacaagaaaaaccaatct

SEQ ID NO: 16470 - DNA, 18 bp, Homo sapiens
ccacaggaaaaccaatct

SEQ ID NO: 16471 - DNA, 64 bp, Periplaneta fuliginosa densovirus
ggaaggagtgtggctaatgctggtaaggcacctttctatcagtacaatcaagcccattcctccc

SEQ ID NO: 16472 - DNA, 24 bp, Periplaneta fuliginosa densovirus
tcagtacaatcaagcccattcctc

SEQ ID NO: 16473 - DNA, 24 bp, Periplaneta fuliginosa densovirus
aggagtgtggctaatgctggtaag

SEQ ID NO: 16474 - DNA, 16 bp, Homo sapiens
gtacaatcaagtcttc

SEQ ID NO: 16475 - DNA, 20 bp, Homo sapiens
atacaacatcttcattcctc

SEQ ID NO: 16476 - DNA, 18 bp, Homo sapiens
tcagtacaggcagggccc

SEQ ID NO: 16477 - DNA, 21 bp, Homo sapiens
agtacaatcaagtcatccctc

SEQ ID NO: 16478 - DNA, 22 bp, Homo sapiens
tcagtacagtcagcaacctcct

SEQ ID NO: 16479 - DNA, 23 bp, Homo sapiens
tcatgcctagtcagcccatttct

SEQ ID NO: 16480 - DNA, 15 bp, Homo sapiens
tcagtgaatcattcc

SEQ ID NO: 16481 - DNA, 21 bp, Homo sapiens
aggaagtggcatgctggtaag

SEQ ID NO: 16482 - DNA, 20 bp, Homo sapiens
aggagtgtggctcagtccaa

SEQ ID NO: 16483 - DNA, 26 bp, Homo sapiens
aggggcgtggctgggggagtggtaag

SEQ ID NO: 16484 - DNA, 17 bp, Homo sapiens
ggagtgtgtctggctgg

SEQ ID NO: 16485 - DNA, 16 bp, Homo sapiens
ggagtgacatgctggt

SEQ ID NO: 16486 - DNA, 17 bp, Homo sapiens
ggggtgtggcagctggc

SEQ ID NO: 16487 - DNA, 21 bp, Homo sapiens
aggagtgtgggtgattgtcag

SEQ ID NO: 16488 - DNA, 16 bp, Homo sapiens
ggagtgtgggtgatga

SEQ ID NO: 16489 - DNA, 22 bp, Homo sapiens
ggggtgtggctggaggcactga

SEQ ID NO: 16490 - DNA, 19 bp, Homo sapiens
aggagtgtgagaccttggt

SEQ ID NO: 16491 - DNA, 15 bp, Homo sapiens
ggaggtgacgctggt

SEQ ID NO: 16492 - DNA, 19 bp, Homo sapiens
agggtgtggctgcacggta

SEQ ID NO: 16493 - DNA, 20 bp, Homo sapiens
aggaatgtggctgggcctga

SEQ ID NO: 16494 - DNA, 62 bp, Periplaneta fuliginosa densovirus
gaggtgtgtggctcagcacgtagagtgacaagtaaatctactgtaataggacacaacacctc

SEQ ID NO: 16495 - DNA, 19 bp, Human spumaretrovirus
taataggacacaacacctc

SEQ ID NO: 16496 - DNA, 24 bp, Periplaneta fuliginosa densovirus
tgtggctcagcacgtagagtgaca

SEQ ID NO: 16497 - DNA, 18 bp, Homo sapiens
tagcactggcaacacctc

SEQ ID NO: 16498 - DNA, 19 bp, Homo sapiens
aataggcagtgcagcacct

SEQ ID NO: 16499 - DNA, 19 bp, Homo sapiens
aatagaacacttgcaacac

SEQ ID NO: 16500 - DNA, 18 bp, Homo sapiens
cagtgacggcaacacctc

SEQ ID NO: 16501 - DNA, 20 bp, Homo sapiens
caataggacagcacatacct

SEQ ID NO: 16502 - DNA, 16 bp, Homo sapiens
taaaaggagacacctc

SEQ ID NO: 16503 - DNA, 19 bp, Homo sapiens
taagacactctaacacttc

SEQ ID NO: 16504 - DNA, 17 bp, Homo sapiens
taacaggacaaaccctc

SEQ ID NO: 16505 - DNA, 23 bp, Homo sapiens
tgtggctcagcaggtgccaaatg

SEQ ID NO: 16506 - DNA, 22 bp, Homo sapiens
tgtggctcagagcagcttgaca

SEQ ID NO: 16507 - DNA, 21 bp, Homo sapiens
tgcggctcggcggcggtggcg

SEQ ID NO: 16508 - DNA, 23 bp, Homo sapiens
tgtggctcagctgacccgtggca

SEQ ID NO: 16509 - DNA, 19 bp, Homo sapiens
tgtggtttacacgcaggca

SEQ ID NO: 16510 - DNA, 18 bp, Homo sapiens
tgtggctcggctggcgac

SEQ ID NO: 16511 - DNA, 22 bp, Homo sapiens
tgtggctcagggccacgtggtg

SEQ ID NO: 16512 - DNA, 17 bp, Homo sapiens
tggctcagcgtgtggtg

SEQ ID NO: 16513 - DNA, 24 bp, Homo sapiens
tgaggctcagcatcgggggtggca

SEQ ID NO: 16514 - DNA, 21 bp, Homo sapiens
tgtggctcggcggtctccatg

SEQ ID NO: 16515 - DNA, 19 bp, Homo sapiens
tgtggctcagcctgagatg

SEQ ID NO: 16516 - DNA, 20 bp, Homo sapiens
tggctcagcactttctgtga

SEQ ID NO: 16517 - DNA, 18 bp, Homo sapiens
tgggctcagcgtttgtgc

SEQ ID NO: 16518 - DNA, 106 bp, Periplaneta fuliginosa densovirus
ggaattgtatattagccttgctaagggagacatctagtgatataagtgtgaactacacttatcttaaatgttgtaactccttaggataatcaatatacaaaattcc

SEQ ID NO: 16519 - DNA, 24 bp, Periplaneta fuliginosa densovirus
aattgtatattagccttgctaagg

SEQ ID NO: 16520 - DNA, 24 bp, Periplaneta fuliginosa densovirus
ttaaatgttgtaactccttaggat

SEQ ID NO: 16521 - DNA, 24 bp, Homo sapiens
aactgtacggtggtcttgctgagg

SEQ ID NO: 16522 - DNA, 17 bp, Homo sapiens
ttaagtgttgtaatcct

SEQ ID NO: 16523 - DNA, 20 bp, Homo sapiens
gttgccactttttttaggat

SEQ ID NO: 16524 - DNA, 76 bp, Periplaneta fuliginosa densovirus
gctgggctcgagcatgacggcgactacctccacctgagcgggggggaggacgcgctcatcaagcatctggcccggc

SEQ ID NO: 16525 - DNA, 24 bp, Periplaneta fuliginosa densovirus
gagcatgacggcgactacctccac

SEQ ID NO: 16526 - DNA, 20 bp, Periplaneta fuliginosa densovirus
catcaagcatctggcccggc

SEQ ID NO: 16527 - DNA, 19 bp, Homo sapiens
caccaggtctaggcccggc

SEQ ID NO: 16528 - DNA, 21 bp, Homo sapiens
catcaagccttctctcactgg

SEQ ID NO: 16529 - DNA, 17 bp, Homo sapiens
acccaggctggctcggc

SEQ ID NO: 16530 - DNA, 17 bp, Homo sapiens
tcgaacatctgagtggc

SEQ ID NO: 16531 - DNA, 18 bp, Homo sapiens
catcgacatctagaaagc

SEQ ID NO: 16532 - DNA, 17 bp, Homo sapiens
tcacagcccaacccggc

SEQ ID NO: 16533 - DNA, 18 bp, Homo sapiens
tcaagtctgcggcccggc

SEQ ID NO: 16534 - DNA, 17 bp, Homo sapiens
catccagcagagcctgg

SEQ ID NO: 16535 - DNA, 17 bp, Homo sapiens
catcaaacgtctccagc

SEQ ID NO: 16536 - DNA, 16 bp, Homo sapiens
tcaggcatctggggac

SEQ ID NO: 16537 - DNA, 20 bp, Homo sapiens
catccggctgctggcccggc

SEQ ID NO: 16538 - DNA, 19 bp, Homo sapiens
catcaaacattgagaaggc

SEQ ID NO: 16539 - DNA, 18 bp, Homo sapiens
caggctcccgggcccggc

SEQ ID NO: 16540 - DNA, 20 bp, Homo sapiens
cagcaggccctcagcccggc

SEQ ID NO: 16541 - DNA, 18 bp, Homo sapiens
catcagcatctatgtggc

SEQ ID NO: 16542 - DNA, 22 bp, Homo sapiens
catcaagcatgttgggaggggc

SEQ ID NO: 16543 - DNA, 18 bp, Homo sapiens
catcaaacacaatttggc

SEQ ID NO: 16544 - DNA, 19 bp, Homo sapiens
catcaagctctttattggc

SEQ ID NO: 16545 - DNA, 17 bp, Homo sapiens
catcaagatctagaggc

SEQ ID NO: 16546 - DNA, 18 bp, Homo sapiens
catcaagcatgttccagc

SEQ ID NO: 16547 - DNA, 17 bp, Homo sapiens
catcaaatgtggtcggc

SEQ ID NO: 16548 - DNA, 16 bp, Homo sapiens
tcgagatcagcccggc

SEQ ID NO: 16549 - DNA, 18 bp, Homo sapiens
catcagcagcagcccggc

SEQ ID NO: 16550 - DNA, 19 bp, Homo sapiens
tcgggctccggggcccggc

SEQ ID NO: 16551 - DNA, 20 bp, Homo sapiens
catcaagcatcctgcatggc

SEQ ID NO: 16552 - DNA, 17 bp, Homo sapiens
catcaagctctagatgc

SEQ ID NO: 16553 - DNA, 18 bp, Homo sapiens
tcgagcatctgaagctgg

SEQ ID NO: 16554 - DNA, 15 bp, Homo sapiens
catctagcggcccgg

SEQ ID NO: 16555 - DNA, 19 bp, Homo sapiens
catcaaacattggtctggc

SEQ ID NO: 16556 - DNA, 17 bp, Homo sapiens
atcaagcactgtcctgc

SEQ ID NO: 16557 - DNA, 21 bp, Homo sapiens
catccagtccgcaggcccggc

SEQ ID NO: 16558 - DNA, 19 bp, Homo sapiens
cacgagcacccaccccggc

SEQ ID NO: 16559 - DNA, 18 bp, Homo sapiens
tcaagcaccgcggtctgg

SEQ ID NO: 16560 - DNA, 20 bp, Homo sapiens
catctaagacactgcctggc

SEQ ID NO: 16561 - DNA, 15 bp, Homo sapiens
tcagcccggcccggc

SEQ ID NO: 16562 - DNA, 18 bp, Homo sapiens
tcaagcacccagctcggc

SEQ ID NO: 16563 - DNA, 18 bp, Homo sapiens
tcaagcatcttcacaggg

SEQ ID NO: 16564 - DNA, 17 bp, Homo sapiens
atcaagcagtaacgagg

SEQ ID NO: 16565 - DNA, 18 bp, Homo sapiens
gcaggtcctgggcccggc

SEQ ID NO: 16566 - DNA, 19 bp, Homo sapiens
caccaagcaccttctctgg

SEQ ID NO: 16567 - DNA, 18 bp, Homo sapiens
caccgcctgtggcccggc

SEQ ID NO: 16568 - DNA, 18 bp, Homo sapiens
tctcgctcctggcccggc

SEQ ID NO: 16569 - DNA, 16 bp, Homo sapiens
tcaggcagaacccggc

SEQ ID NO: 16570 - DNA, 74 bp, Rat cytomegalovirus
acatctgggacagttctgccgcttgacccatatacgtatttaatggtgcaggggttccattctgttctgatcgt

SEQ ID NO: 16571 - DNA, 24 bp, Rat cytomegalovirus
gtgcaggggttccattctgttctg

SEQ ID NO: 16572 - DNA, 24 bp, Rat cytomegalovirus
tgggacagttctgccgcttgaccc

SEQ ID NO: 16573 - DNA, 17 bp, Homo sapiens
gtgggggtttcatgctg

SEQ ID NO: 16574 - DNA, 17 bp, Homo sapiens
gtgcagggatttctact

SEQ ID NO: 16575 - DNA, 18 bp, Homo sapiens
atgtaggggttctgtctg

SEQ ID NO: 16576 - DNA, 27 bp, Homo sapiens
gtgcaggggtttctgtttcctcctctg

SEQ ID NO: 16577 - DNA, 20 bp, Homo sapiens
agtacaattctgctgcttga

SEQ ID NO: 16578 - DNA, 20 bp, Homo sapiens
tgggatggtgctagtggctc

SEQ ID NO: 16579 - DNA, 20 bp, Homo sapiens
tggggcaattctaatggcct

SEQ ID NO: 16580 - DNA, 16 bp, Homo sapiens
gggacagttctgtctc

SEQ ID NO: 16581 - DNA, 23 bp, Homo sapiens
tgggacagtcccttttttggccc

SEQ ID NO: 16582 - DNA, 16 bp, Homo sapiens
gggcagttctgggccc

SEQ ID NO: 16583 - DNA, 19 bp, Homo sapiens
ggacagttttgccaagctc

SEQ ID NO: 16584 - DNA, 20 bp, Homo sapiens
tgggacagtttgctgtgcct

SEQ ID NO: 16585 - DNA, 79 bp, Rat cytomegalovirus
cggctggacgttggtccgcaggcggtcgcggaggaaccccgggaagccgttggcgaccttgaggacccgcgcccggtcg

SEQ ID NO: 16586 - DNA, 24 bp, Rat cytomegalovirus
aagccgttggcgaccttgaggacc

SEQ ID NO: 16587 - DNA, 24 bp, Rat cytomegalovirus
aggcggtcgcggaggaaccccggg

SEQ ID NO: 16588 - DNA, 16 bp, Homo sapiens
gccgctggtgaccgac

SEQ ID NO: 16589 - DNA, 21 bp, Homo sapiens
gccgctggtggccgcccggcc

SEQ ID NO: 16590 - DNA, 21 bp, Homo sapiens
gcccccacgtggccttgagga

SEQ ID NO: 16591 - DNA, 17 bp, Homo sapiens
agccgttggcgccgggc

SEQ ID NO: 16592 - DNA, 24 bp, Homo sapiens
aggcgttggcgatgccacctgggg

SEQ ID NO: 16593 - DNA, 22 bp, Homo sapiens
agccgttgcggctcaggaggac

SEQ ID NO: 16594 - DNA, 21 bp, Homo sapiens
gccgtggcggccccagcagga

SEQ ID NO: 16595 - DNA, 16 bp, Homo sapiens
gttgggcgtgaggacc

SEQ ID NO: 16596 - DNA, 19 bp, Homo sapiens
gccgctggcgacccgcagg

SEQ ID NO: 16597 - DNA, 24 bp, Homo sapiens
aggcggccgactccgggtcccggg

SEQ ID NO: 16598 - DNA, 19 bp, Homo sapiens
aggggtcaggaaccctggg

SEQ ID NO: 16599 - DNA, 19 bp, Homo sapiens
aggcagtcgtggcctttgg

SEQ ID NO: 16600 - DNA, 22 bp, Homo sapiens
aggatctgggagggatcctggg

SEQ ID NO: 16601 - DNA, 19 bp, Homo sapiens
ggccggtcgttagctccgg

SEQ ID NO: 16602 - DNA, 21 bp, Homo sapiens
ggcagtaccaggagctctggg

SEQ ID NO: 16603 - DNA, 15 bp, Homo sapiens
aggggtcggactccg

SEQ ID NO: 16604 - DNA, 23 bp, Homo sapiens
aggggtcgcggccgcccctcggg

SEQ ID NO: 16605 - DNA, 24 bp, Homo sapiens
ggcggtcagcagaatggccccggg

SEQ ID NO: 16606 - DNA, 24 bp, Homo sapiens
aggctgggcttggggagtcccggg

SEQ ID NO: 16607 - DNA, 19 bp, Homo sapiens
agctggtgcggggctctgg

SEQ ID NO: 16608 - DNA, 15 bp, Homo sapiens
ggcggtgaggccccg

SEQ ID NO: 16609 - DNA, 21 bp, Homo sapiens
aggggtcacaggggccctggg

SEQ ID NO: 16610 - DNA, 18 bp, Homo sapiens
ggcggccgcggagggcgg

SEQ ID NO: 16611 - DNA, 15 bp, Homo sapiens
gacggtcgtggggcg

SEQ ID NO: 16612 - DNA, 23 bp, Homo sapiens
acgtgtgttgggggaatcctggg

SEQ ID NO: 16613 - DNA, 21 bp, Homo sapiens
ggtgggcagaggagctttggg

SEQ ID NO: 16614 - DNA, 23 bp, Homo sapiens
agctgggacagaggagccccggg

SEQ ID NO: 16615 - DNA, 96 bp, Rat cytomegalovirus
gctgaggaggccggagtcgtcggcctgctcgtgcggcacgccgaagacgaaggtgaagccctcgggccaggccaggcgacagcggaactcctcggc

SEQ ID NO: 16616 - DNA, 24 bp, Rat cytomegalovirus
tgaagccctcgggccaggccaggc

SEQ ID NO: 16617 - DNA, 24 bp, Rat cytomegalovirus
agtcgtcggcctgctcgtgcggca

SEQ ID NO: 16618 - DNA, 16 bp, Homo sapiens
gccgggccaggccggg

SEQ ID NO: 16619 - DNA, 18 bp, Homo sapiens
gcgggggccgggccaggc

SEQ ID NO: 16620 - DNA, 20 bp, Homo sapiens
tgagaccctcgggctgtggc

SEQ ID NO: 16621 - DNA, 23 bp, Homo sapiens
tggcagccgaggctgggccaggc

SEQ ID NO: 16622 - DNA, 20 bp, Homo sapiens
gaggccagatcaggccaggc

SEQ ID NO: 16623 - DNA, 22 bp, Homo sapiens
tgaggttcccggcagcccaggc

SEQ ID NO: 16624 - DNA, 22 bp, Homo sapiens
gccaggccgggccaggccgggc

SEQ ID NO: 16625 - DNA, 22 bp, Homo sapiens
tgagattcttgggccaaaaagc

SEQ ID NO: 16626 - DNA, 23 bp, Homo sapiens
cggagccttgtcccaggctgggc

SEQ ID NO: 16627 - DNA, 18 bp, Homo sapiens
tgaggccctcggatcggc

SEQ ID NO: 16628 - DNA, 21 bp, Homo sapiens
tgagccctcggggagccaggc

SEQ ID NO: 16629 - DNA, 19 bp, Homo sapiens
gccgggctccgggccaggc

SEQ ID NO: 16630 - DNA, 16 bp, Homo sapiens
tgagcctgggccaggc

SEQ ID NO: 16631 - DNA, 18 bp, Homo sapiens
tggagacctcgggctagc

SEQ ID NO: 16632 - DNA, 20 bp, Homo sapiens
gaagcccggtcaggccaggc

SEQ ID NO: 16633 - DNA, 17 bp, Homo sapiens
gccaggccaggccaggc

SEQ ID NO: 16634 - DNA, 21 bp, Homo sapiens
tgcggccctcgggtcgccggc

SEQ ID NO: 16635 - DNA, 20 bp, Homo sapiens
actcctcctccaggccaggc

SEQ ID NO: 16636 - DNA, 21 bp, Homo sapiens
gaggtcctctccgggccaggc

SEQ ID NO: 16637 - DNA, 19 bp, Homo sapiens
tggggccccgggcctcggc

SEQ ID NO: 16638 - DNA, 22 bp, Homo sapiens
tgaggccctcggcctagaacag

SEQ ID NO: 16639 - DNA, 24 bp, Homo sapiens
tgacaggacagggtcaggccaggc

SEQ ID NO: 16640 - DNA, 19 bp, Homo sapiens
gaagcctgagcaggccagg

SEQ ID NO: 16641 - DNA, 20 bp, Homo sapiens
tgaagctgcctaggccaggc

SEQ ID NO: 16642 - DNA, 21 bp, Homo sapiens
tgaagccctctgggcacaggc

SEQ ID NO: 16643 - DNA, 25 bp, Homo sapiens
tggagacctcgggcaggacccaggc

SEQ ID NO: 16644 - DNA, 20 bp, Homo sapiens
gaggcccagccaggccgggc

SEQ ID NO: 16645 - DNA, 22 bp, Homo sapiens
tgaggcccacggtgggccaggc

SEQ ID NO: 16646 - DNA, 16 bp, Homo sapiens
agttgtcagcctgtgg

SEQ ID NO: 16647 - DNA, 19 bp, Homo sapiens
tcgtggggctcgtgcggca

SEQ ID NO: 16648 - DNA, 131 bp, Ectromelia virus
gctattaaacagtatggagacattgatctattatttaatgagaaacttaaagtagactccgattcgggactatttgactttgtcaactttgtaaaggatatgatatgttgtgattctagaatagtagtagc

SEQ ID NO: 16649 - DNA, 24 bp, Ectromelia virus
tgagaaacttaaagtagactccga

SEQ ID NO: 16650 - DNA, 24 bp, Ectromelia virus
gactatttgactttgtcaactttg

SEQ ID NO: 16651 - DNA, 18 bp, Homo sapiens
actgtttggctttgtcaa

SEQ ID NO: 16652 - DNA, 65 bp, Ectromelia virus
ttgaaactccgccccttacttttattaaaaatcttcaagatgaaatgtttacaatagaaattcga

SEQ ID NO: 16653 - DNA, 24 bp, Ectromelia virus
tgaaatgtttacaatagaaattcg

SEQ ID NO: 16654 - DNA, 24 bp, Ectromelia virus
actccgccccttacttttattaaa

SEQ ID NO: 16655 - DNA, 18 bp, Homo sapiens
tggaatgtttacaacaga

SEQ ID NO: 16656 - DNA, 20 bp, Homo sapiens
tgaaatatttacagtagaaa

SEQ ID NO: 16657 - DNA, 19 bp, Homo sapiens
gccccttacttagcataaa

SEQ ID NO: 16658 - DNA, 18 bp, Homo sapiens
actcttccccttatttta

SEQ ID NO: 16659 - DNA, 16 bp, Homo sapiens
cccctgttttattaaa

SEQ ID NO: 16660 - DNA, 18 bp, Homo sapiens
acgccgccctcccttatt

SEQ ID NO: 16661 - DNA, 25 bp, Homo sapiens
actttccccttttcctattattaaa

SEQ ID NO: 16662 - DNA, 18 bp, Homo sapiens
ctcctcttcttacttcta

SEQ ID NO: 16663 - DNA, 17 bp, Homo sapiens
actctgcccttatttta

SEQ ID NO: 16664 - DNA, 88 bp, Ectromelia virus
gccggttagtatgacttacttgtataataagtatagttttaaactgattttagcagaatatataagacacagaaatactatatccggc

SEQ ID NO: 16665 - DNA, 24 bp, Ectromelia virus
taagacacagaaatactatatccg

SEQ ID NO: 16666 - DNA, 17 bp, Homo sapiens
agacacagctcctatat

SEQ ID NO: 16667 - DNA, 23 bp, Homo sapiens
aagaggaggaaatactatatccg

SEQ ID NO: 16668 - DNA, 101 bp, Drosophila C virus
gttgttttcattgttgatggtaaggattcttattttgaagtggtttttcagaagataactctaaatatgaattatgccttattgttttcaatgttgatggc

SEQ ID NO: 16669 - DNA, 24 bp, Drosophila C virus
ttgatggtaaggattcttattttg

SEQ ID NO: 16670 - DNA, 24 bp, Drosophila C virus
ataactctaaatatgaattatgcc

SEQ ID NO: 16671 - DNA, 22 bp, Homo sapiens
ttgatgtgtgatctttattttg

SEQ ID NO: 16672 - DNA, 24 bp, Homo sapiens
acaactctaaatgctctacgtgcc

SEQ ID NO: 16673 - DNA, 20 bp, Homo sapiens
taactctagttattgtatgc

SEQ ID NO: 16674 - DNA, 97 bp, Drosophila C virus
attgacttcgaagaaagatgcgtcttttggatttgtaatgactgggccttaagttcataggtgttattacatggaggaacacattactttggttgat

SEQ ID NO: 16675 - DNA, 24 bp, Drosophila C virus
ttacatggaggaacacattacttt

SEQ ID NO: 16676 - DNA, 24 bp, Drosophila C virus
tcgaagaaagatgcgtcttttgga

SEQ ID NO: 16677 - DNA, 22 bp, Homo sapiens
tggatggattttacattacttt

SEQ ID NO: 16678 - DNA, 21 bp, Homo sapiens
ttacaggaagtgtattacttt

SEQ ID NO: 16679 - DNA, 21 bp, Homo sapiens
ttacatggagacggttacttt

SEQ ID NO: 16680 - DNA, 21 bp, Homo sapiens
atggaggaataaagtgacttt

SEQ ID NO: 16681 - DNA, 15 bp, Homo sapiens
atggaggaaatactt

SEQ ID NO: 16682 - DNA, 21 bp, Homo sapiens
ggaaagggaacacattacttt

SEQ ID NO: 16683 - DNA, 20 bp, Homo sapiens
gaggcagctgtgtcttttgg

SEQ ID NO: 16684 - DNA, 18 bp, Homo sapiens
tcggagggcgccttttgg

SEQ ID NO: 16685 - DNA, 14 bp, Homo sapiens
agaaagatgtctgg

SEQ ID NO: 16686 - DNA, 20 bp, Homo sapiens
gaagaaaaagcaattttgga

SEQ ID NO: 16687 - DNA, 22 bp, Homo sapiens
gaaaaaagaagtagttttttgg

SEQ ID NO: 16688 - DNA, 24 bp, Homo sapiens
tcggagagagatccgtctcctgga

SEQ ID NO: 16689 - DNA, 22 bp, Homo sapiens
gaggaaagatgtgggaaatgga

SEQ ID NO: 16690 - DNA, 121 bp, Drosophila C virus
ggggcaagcaatgatgtcttttcgttggtcattttttccacatacgaattatttggtcagcacattgaatccttcaaattcgatatggcaaaagtgtttcgagaaattattgaaacgcctc

SEQ ID NO: 16691 - DNA, 24 bp, Drosophila C virus
tggcaaaagtgtttcgagaaatta

SEQ ID NO: 16692 - DNA, 24 bp, Drosophila C virus
tccacatacgaattatttggtcag

SEQ ID NO: 16693 - DNA, 17 bp, Homo sapiens
tgggaaagtgttttgag

SEQ ID NO: 16694 - DNA, 23 bp, Homo sapiens
tggtaagaatgcagtagaaatta

SEQ ID NO: 16695 - DNA, 18 bp, Homo sapiens
tggcacttttgagaaatt

SEQ ID NO: 16696 - DNA, 18 bp, Homo sapiens
tgttaaaagtgttttgaa

SEQ ID NO: 16697 - DNA, 18 bp, Homo sapiens
cacatgccaattatttgg

SEQ ID NO: 16698 - DNA, 19 bp, Homo sapiens
tccacatattggttatttg

SEQ ID NO: 16699 - DNA, 111 bp, Drosophila C virus
gcggaagtgacgcaagcggaaggggaggagcaggaaggggaggagcaggacccactaacccgcccactaacccgcccactaacccgcccactaacccgcccactaacccgc

SEQ ID NO: 16700 - DNA, 24 bp, Drosophila C virus
aacccgcccactaacccgcccact

SEQ ID NO: 16701 - DNA, 24 bp, Drosophila C virus
aagcggaaggggaggagcaggaag

SEQ ID NO: 16702 - DNA, 21 bp, Homo sapiens
actcctctggtcccgcccact

SEQ ID NO: 16703 - DNA, 20 bp, Homo sapiens
cgcccaccagcctgtccgct

SEQ ID NO: 16704 - DNA, 22 bp, Homo sapiens
cgcctgcatccacccgcccgct

SEQ ID NO: 16705 - DNA, 19 bp, Homo sapiens
ccctctgctaccacccact

SEQ ID NO: 16706 - DNA, 20 bp, Homo sapiens
cgcctctaacccagaccact

SEQ ID NO: 16707 - DNA, 20 bp, Homo sapiens
acccgccccctcggccccgc

SEQ ID NO: 16708 - DNA, 19 bp, Homo sapiens
ccgcctctcgccgcccact

SEQ ID NO: 16709 - DNA, 19 bp, Homo sapiens
ccgcccacggaggcccact

SEQ ID NO: 16710 - DNA, 25 bp, Homo sapiens
acccgccctgcctggcctgcccact

SEQ ID NO: 16711 - DNA, 23 bp, Homo sapiens
aagtggaaagggagatgtgggga

SEQ ID NO: 16712 - DNA, 16 bp, Homo sapiens
ggaggaaggtgcggga

SEQ ID NO: 16713 - DNA, 17 bp, Homo sapiens
gcgggaggggaggacgg

SEQ ID NO: 16714 - DNA, 18 bp, Homo sapiens
ggaagggggggcacgaag

SEQ ID NO: 16715 - DNA, 18 bp, Homo sapiens
aagggaaggggaggagag

SEQ ID NO: 16716 - DNA, 18 bp, Homo sapiens
agctgggaggggtaggag

SEQ ID NO: 16717 - DNA, 16 bp, Homo sapiens
ggaggggaggacatga

SEQ ID NO: 16718 - DNA, 15 bp, Homo sapiens
ggagggggggaggga

SEQ ID NO: 16719 - DNA, 19 bp, Homo sapiens
ggcactggggggcaggaag

SEQ ID NO: 16720 - DNA, 17 bp, Homo sapiens
ggaagggactcaggaag

SEQ ID NO: 16721 - DNA, 22 bp, Homo sapiens
aagggaaggcagcaaagcagga

SEQ ID NO: 16722 - DNA, 16 bp, Homo sapiens
gcgaaggggaggggaa

SEQ ID NO: 16723 - DNA, 21 bp, Homo sapiens
aagtggaggggcacagggaag

SEQ ID NO: 16724 - DNA, 19 bp, Homo sapiens
aagcaggaaggggaaggag

SEQ ID NO: 16725 - DNA, 19 bp, Homo sapiens
agggaagcaaaagggcagg

SEQ ID NO: 16726 - DNA, 27 bp, Homo sapiens
aagctgaagacacatgggagtgggagg

SEQ ID NO: 16727 - DNA, 21 bp, Homo sapiens
aagcagagggtcaccagcggg

SEQ ID NO: 16728 - DNA, 19 bp, Homo sapiens
agcaggggtggggtgggga

SEQ ID NO: 16729 - DNA, 23 bp, Homo sapiens
aagggggaggggagggttagagg

SEQ ID NO: 16730 - DNA, 18 bp, Homo sapiens
aagggaagggggagggga

SEQ ID NO: 16731 - DNA, 18 bp, Homo sapiens
gggaggggagaggcagga

SEQ ID NO: 16732 - DNA, 16 bp, Homo sapiens
ggaggggagggcagga

SEQ ID NO: 16733 - DNA, 18 bp, Homo sapiens
aaggggaaggggagcgaa

SEQ ID NO: 16734 - DNA, 21 bp, Homo sapiens
aagagggaggggagggacaag

SEQ ID NO: 16735 - DNA, 20 bp, Homo sapiens
agaggagggggtaggggaag

SEQ ID NO: 16736 - DNA, 18 bp, Homo sapiens
ggtaggaggaggagaagg

SEQ ID NO: 16737 - DNA, 22 bp, Homo sapiens
aagtggtaggcaagaagcagga

SEQ ID NO: 16738 - DNA, 18 bp, Homo sapiens
agtggaggggaggccaag

SEQ ID NO: 16739 - DNA, 18 bp, Homo sapiens
agaggaaaaggagcagga

SEQ ID NO: 16740 - DNA, 17 bp, Homo sapiens
gcgggagggaaggcaag

SEQ ID NO: 16741 - DNA, 19 bp, Homo sapiens
gggaggggaggggcgcagg

SEQ ID NO: 16742 - DNA, 19 bp, Homo sapiens
gcgggggaagggggcggga

SEQ ID NO: 16743 - DNA, 25 bp, Homo sapiens
gggtggagagaagcaaagtaggaag

SEQ ID NO: 16744 - DNA, 21 bp, Homo sapiens
ggagggagccccagcaggaag

SEQ ID NO: 16745 - DNA, 19 bp, Homo sapiens
aggggaaggggaaaaaagg

SEQ ID NO: 16746 - DNA, 19 bp, Homo sapiens
gcggggagggggtcccagg

SEQ ID NO: 16747 - DNA, 19 bp, Homo sapiens
aagctgaacggggcaggaa

SEQ ID NO: 16748 - DNA, 18 bp, Homo sapiens
agaggagggggagggcag

SEQ ID NO: 16749 - DNA, 19 bp, Homo sapiens
aggggaggggaagaggagg

SEQ ID NO: 16750 - DNA, 20 bp, Homo sapiens
agggaaggggaggagaggga

SEQ ID NO: 16751 - DNA, 19 bp, Homo sapiens
aagaggaggaggtatggga

SEQ ID NO: 16752 - DNA, 19 bp, Homo sapiens
aagtggaagggggtacaag

SEQ ID NO: 16753 - DNA, 16 bp, Homo sapiens
gggaggggggagggaa

SEQ ID NO: 16754 - DNA, 16 bp, Homo sapiens
ggaagaagagcgggga

SEQ ID NO: 16755 - DNA, 17 bp, Homo sapiens
agtgagggaggtaggga

SEQ ID NO: 16756 - DNA, 19 bp, Homo sapiens
aagggaggggactctcagg

SEQ ID NO: 16757 - DNA, 18 bp, Homo sapiens
aggggaggggagaggagg

SEQ ID NO: 16758 - DNA, 20 bp, Homo sapiens
ggaaggggaggagacattgg

SEQ ID NO: 16759 - DNA, 21 bp, Homo sapiens
agccggagggggagccgcggg

SEQ ID NO: 16760 - DNA, 18 bp, Homo sapiens
gagggggagggggcaaaa

SEQ ID NO: 16761 - DNA, 15 bp, Homo sapiens
gcgggagggggcagg

SEQ ID NO: 16762 - DNA, 18 bp, Homo sapiens
gcgggagaggaggagagg

SEQ ID NO: 16763 - DNA, 22 bp, Homo sapiens
aggggaaggggatgaagggaag

SEQ ID NO: 16764 - DNA, 19 bp, Homo sapiens
gcgggggaggaggtccaag

SEQ ID NO: 16765 - DNA, 18 bp, Homo sapiens
ggagtggaggcaagcagg

SEQ ID NO: 16766 - DNA, 19 bp, Homo sapiens
gggcggggccggagcagga

SEQ ID NO: 16767 - DNA, 19 bp, Homo sapiens
ggacgggaggaggtgggga

SEQ ID NO: 16768 - DNA, 18 bp, Homo sapiens
aagcggcgggggaacagg

SEQ ID NO: 16769 - DNA, 23 bp, Homo sapiens
agcagggtgcagggggcaggaag

SEQ ID NO: 16770 - DNA, 18 bp, Homo sapiens
agtgggaggaggcgggga

SEQ ID NO: 16771 - DNA, 20 bp, Homo sapiens
gcggaggaggagggtgggga

SEQ ID NO: 16772 - DNA, 17 bp, Homo sapiens
ggcagaagcagcaggaa

SEQ ID NO: 16773 - DNA, 20 bp, Homo sapiens
aagaggaagccaggggcagg

SEQ ID NO: 16774 - DNA, 21 bp, Homo sapiens
agaggagggggcgccgggaag

SEQ ID NO: 16775 - DNA, 19 bp, Homo sapiens
gcagcgtagaggagcagga

SEQ ID NO: 16776 - DNA, 20 bp, Homo sapiens
aagtgggaggaggagaagga

SEQ ID NO: 16777 - DNA, 21 bp, Homo sapiens
gctggggtggggggagcagga

SEQ ID NO: 16778 - DNA, 21 bp, Homo sapiens
ggtgggggtggggacaggaag

SEQ ID NO: 16779 - DNA, 24 bp, Homo sapiens
agtggcctatcgaggagcaggaag

SEQ ID NO: 16780 - DNA, 17 bp, Homo sapiens
gggaggaggggcgggga

SEQ ID NO: 16781 - DNA, 24 bp, Homo sapiens
gcggggagaggaaggagcgggaag

SEQ ID NO: 16782 - DNA, 16 bp, Homo sapiens
ggagcaaagggcggga

SEQ ID NO: 16783 - DNA, 16 bp, Homo sapiens
gcgagggggagagagg

SEQ ID NO: 16784 - DNA, 20 bp, Homo sapiens
aagctggaggacagggcagg

SEQ ID NO: 16785 - DNA, 18 bp, Homo sapiens
gcgggaggaggggaggag

SEQ ID NO: 16786 - DNA, 24 bp, Homo sapiens
aaacggaagcggcggggagcagga

SEQ ID NO: 16787 - DNA, 19 bp, Homo sapiens
gcaggaggagccagcagga

SEQ ID NO: 16788 - DNA, 19 bp, Homo sapiens
agtagacctaggagcagga

SEQ ID NO: 16789 - DNA, 21 bp, Homo sapiens
aaggggaagttgggtgggagg

SEQ ID NO: 16790 - DNA, 22 bp, Homo sapiens
gcaggaagtctatggcaggaag

SEQ ID NO: 16791 - DNA, 18 bp, Homo sapiens
aaggggagggggggacgg

SEQ ID NO: 16792 - DNA, 20 bp, Homo sapiens
gcgcagggtgcagcaggaag

SEQ ID NO: 16793 - DNA, 19 bp, Homo sapiens
ggagggggaggagacgaag

SEQ ID NO: 16794 - DNA, 22 bp, Homo sapiens
aagtggaaaggggacagtggga

SEQ ID NO: 16795 - DNA, 16 bp, Homo sapiens
gcggggggaggaaagg

SEQ ID NO: 16796 - DNA, 19 bp, Homo sapiens
gcagggagggagagcagga

SEQ ID NO: 16797 - DNA, 19 bp, Homo sapiens
agcaggaggggagcttgga

SEQ ID NO: 16798 - DNA, 22 bp, Homo sapiens
gggaggggaagacagcaggaag

SEQ ID NO: 16799 - DNA, 18 bp, Homo sapiens
agcagggggggatgggaa

SEQ ID NO: 16800 - DNA, 21 bp, Homo sapiens
aggggaggggaggatggggga

SEQ ID NO: 16801 - DNA, 17 bp, Homo sapiens
cgggaggggagggcagg

SEQ ID NO: 16802 - DNA, 20 bp, Homo sapiens
agcggaggggaggcgctgga

SEQ ID NO: 16803 - DNA, 20 bp, Homo sapiens
ggaaggggagaggcaggaag

SEQ ID NO: 16804 - DNA, 17 bp, Homo sapiens
agtggaaggagaaggga

SEQ ID NO: 16805 - DNA, 18 bp, Homo sapiens
acgggaggggagggcggg

SEQ ID NO: 16806 - DNA, 19 bp, Homo sapiens
gcgggagtggcagaggagg

SEQ ID NO: 16807 - DNA, 19 bp, Homo sapiens
agagggggcgcagggcagg

SEQ ID NO: 16808 - DNA, 19 bp, Homo sapiens
ggatgggggtggagcagga

SEQ ID NO: 16809 - DNA, 17 bp, Homo sapiens
gggtgggaggaggagga

SEQ ID NO: 16810 - DNA, 18 bp, Homo sapiens
aagggagggctgggcagg

SEQ ID NO: 16811 - DNA, 18 bp, Homo sapiens
aggggaggcaggtaggaa

SEQ ID NO: 16812 - DNA, 21 bp, Homo sapiens
ggcaggagaccaggcaggaag

SEQ ID NO: 16813 - DNA, 20 bp, Homo sapiens
gcggcggagaggagcgggga

SEQ ID NO: 16814 - DNA, 19 bp, Homo sapiens
gaatggggtggggcaggaa

SEQ ID NO: 16815 - DNA, 18 bp, Homo sapiens
gcgggtggggaggagaag

SEQ ID NO: 16816 - DNA, 19 bp, Homo sapiens
ggcaggcaccaggagcagg

SEQ ID NO: 16817 - DNA, 20 bp, Homo sapiens
gcgggaggggaggtgcctgg

SEQ ID NO: 16818 - DNA, 17 bp, Homo sapiens
gcggcaggggaggcggg

SEQ ID NO: 16819 - DNA, 20 bp, Homo sapiens
agcggcggggcgggcgggga

SEQ ID NO: 16820 - DNA, 19 bp, Homo sapiens
ggttgaagggaggggcagg

SEQ ID NO: 16821 - DNA, 22 bp, Homo sapiens
gcagggagggctgagcgggaag

SEQ ID NO: 16822 - DNA, 18 bp, Homo sapiens
agggaagggggttgggag

SEQ ID NO: 16823 - DNA, 18 bp, Homo sapiens
ggcaggggaggtaggagg

SEQ ID NO: 16824 - DNA, 22 bp, Homo sapiens
gcagagggggaggggagggaag

SEQ ID NO: 16825 - DNA, 19 bp, Homo sapiens
aagtggaaggagagaggaa

SEQ ID NO: 16826 - DNA, 19 bp, Homo sapiens
aggggaggggaggggggga

SEQ ID NO: 16827 - DNA, 19 bp, Homo sapiens
aggggagggggggaggggg

SEQ ID NO: 16828 - DNA, 20 bp, Homo sapiens
agcggaaaggggagttgggg

SEQ ID NO: 16829 - DNA, 18 bp, Homo sapiens
agctggcacaggagcagg

SEQ ID NO: 16830 - DNA, 24 bp, Homo sapiens
aagaggaggggaacgagtgggaag

SEQ ID NO: 16831 - DNA, 17 bp, Homo sapiens
ggaaggagggtaggaag

SEQ ID NO: 16832 - DNA, 16 bp, Homo sapiens
gggggaagggacagga

SEQ ID NO: 16833 - DNA, 17 bp, Homo sapiens
gggcggggagaagtgga

SEQ ID NO: 16834 - DNA, 23 bp, Homo sapiens
aagggaagggacatgcagcagga

SEQ ID NO: 16835 - DNA, 21 bp, Homo sapiens
ggaagggagatgtgaggcagg

SEQ ID NO: 16836 - DNA, 25 bp, Homo sapiens
agaggagatgggggaggggtgggga

SEQ ID NO: 16837 - DNA, 19 bp, Homo sapiens
aagcagaaggaggtaggag

SEQ ID NO: 16838 - DNA, 24 bp, Homo sapiens
aggggaaggggaggggaggggaag

SEQ ID NO: 16839 - DNA, 19 bp, Homo sapiens
ggaaggggggcttacagaa

SEQ ID NO: 16840 - DNA, 18 bp, Homo sapiens
gcaatctggaggggcagg

SEQ ID NO: 16841 - DNA, 23 bp, Homo sapiens
aggggaaggagacgagagtggga

SEQ ID NO: 16842 - DNA, 22 bp, Homo sapiens
agtgggaggggaggggcggcag

SEQ ID NO: 16843 - DNA, 19 bp, Homo sapiens
agtgggaggggaggggcgg

SEQ ID NO: 16844 - DNA, 17 bp, Homo sapiens
agggggaggggagggga

SEQ ID NO: 16845 - DNA, 19 bp, Homo sapiens
cggaggggaggggctgagg

SEQ ID NO: 16846 - DNA, 19 bp, Homo sapiens
cgggctgggaggagtggga

SEQ ID NO: 16847 - DNA, 18 bp, Homo sapiens
gctgggaggggatgggag

SEQ ID NO: 16848 - DNA, 16 bp, Homo sapiens
ggagggatgagcagga

SEQ ID NO: 16849 - DNA, 22 bp, Homo sapiens
gcagaagggttggagggcagga

SEQ ID NO: 16850 - DNA, 21 bp, Homo sapiens
agagggaggggagggaggggg

SEQ ID NO: 16851 - DNA, 20 bp, Homo sapiens
agtggagggtgggggcctga

SEQ ID NO: 16852 - DNA, 16 bp, Homo sapiens
ggaaggggtggcagga

SEQ ID NO: 16853 - DNA, 18 bp, Homo sapiens
aagggaggggggggcggg

SEQ ID NO: 16854 - DNA, 22 bp, Homo sapiens
aagtgtgaggggagatcacggg

SEQ ID NO: 16855 - DNA, 19 bp, Homo sapiens
agtggaaggagaaacggga

SEQ ID NO: 16856 - DNA, 23 bp, Homo sapiens
ggagggggttcaagggcaggaag

SEQ ID NO: 16857 - DNA, 20 bp, Homo sapiens
aagctgaaggggaggcgtga

SEQ ID NO: 16858 - DNA, 19 bp, Homo sapiens
cggagaagaggagtgggga

SEQ ID NO: 16859 - DNA, 17 bp, Homo sapiens
ggagggaggggaaggaa

SEQ ID NO: 16860 - DNA, 20 bp, Homo sapiens
aagtgggagagggggcagga

SEQ ID NO: 16861 - DNA, 19 bp, Homo sapiens
cgggaggggagggcgagga

SEQ ID NO: 16862 - DNA, 18 bp, Homo sapiens
ggagggcggagcaggaag

SEQ ID NO: 16863 - DNA, 19 bp, Homo sapiens
gcgggaggcgagcgagagg

SEQ ID NO: 16864 - DNA, 21 bp, Homo sapiens
aaccggctgtgggggagcagg

SEQ ID NO: 16865 - DNA, 20 bp, Homo sapiens
agagaaagaggggcaggaag

SEQ ID NO: 16866 - DNA, 20 bp, Homo sapiens
aaggggaggggagaggcagg

SEQ ID NO: 16867 - DNA, 17 bp, Homo sapiens
aggggaaggggagggga

SEQ ID NO: 16868 - DNA, 17 bp, Homo sapiens
ggaggtcaggagcagga

SEQ ID NO: 16869 - DNA, 19 bp, Homo sapiens
gcggggggggggttcagga

SEQ ID NO: 16870 - DNA, 18 bp, Homo sapiens
aaggggaggaagtgggaa

SEQ ID NO: 16871 - DNA, 16 bp, Homo sapiens
agcggaagggcgggca

SEQ ID NO: 16872 - DNA, 20 bp, Homo sapiens
agggaaggggaaaagacagg

SEQ ID NO: 16873 - DNA, 17 bp, Homo sapiens
ggagggagggtcaggaa

SEQ ID NO: 16874 - DNA, 18 bp, Homo sapiens
ggaagggcagcagcagga

SEQ ID NO: 16875 - DNA, 18 bp, Homo sapiens
ggggggggcggcgggaag

SEQ ID NO: 16876 - DNA, 19 bp, Homo sapiens
gagagcagaggagcaggaa

SEQ ID NO: 16877 - DNA, 19 bp, Homo sapiens
gcggggtggggggcaagga

SEQ ID NO: 16878 - DNA, 17 bp, Homo sapiens
ggctgagggggagagaa

SEQ ID NO: 16879 - DNA, 24 bp, Homo sapiens
agtggaggggaaggactgcgggga

SEQ ID NO: 16880 - DNA, 16 bp, Homo sapiens
ggaggggggagcagga

SEQ ID NO: 16881 - DNA, 19 bp, Homo sapiens
gcggaggggaaggagtggg

SEQ ID NO: 16882 - DNA, 21 bp, Homo sapiens
gcgcgaggggaggggacccgg

SEQ ID NO: 16883 - DNA, 18 bp, Homo sapiens
gcggagcgggagacgagg

SEQ ID NO: 16884 - DNA, 23 bp, Homo sapiens
aagcaggaggctggcggagcagg

SEQ ID NO: 16885 - DNA, 18 bp, Homo sapiens
ggagggaggggcatggga

SEQ ID NO: 16886 - DNA, 20 bp, Homo sapiens
agccgggagcagggagcagg

SEQ ID NO: 16887 - DNA, 23 bp, Homo sapiens
aagtggcaggggttaggagcagg

SEQ ID NO: 16888 - DNA, 24 bp, Homo sapiens
aagggaaggggctaaagcaggaag

SEQ ID NO: 16889 - DNA, 23 bp, Homo sapiens
aagggagggaaaatggcaggaag

SEQ ID NO: 16890 - DNA, 22 bp, Homo sapiens
aagggaagctgggggtgggaag

SEQ ID NO: 16891 - DNA, 23 bp, Homo sapiens
gagagggagaagggggtaggaag

SEQ ID NO: 16892 - DNA, 19 bp, Homo sapiens
gcggaggggagagtgggga

SEQ ID NO: 16893 - DNA, 18 bp, Homo sapiens
aagtggaggggaggggaa

SEQ ID NO: 16894 - DNA, 19 bp, Homo sapiens
agaggagggggaggaggga

SEQ ID NO: 16895 - DNA, 22 bp, Homo sapiens
aagcgggaggggaggcgggaag

SEQ ID NO: 16896 - DNA, 20 bp, Homo sapiens
gggtggggagaagaggcagg

SEQ ID NO: 16897 - DNA, 19 bp, Homo sapiens
aagcagagggcagtgggaa

SEQ ID NO: 16898 - DNA, 21 bp, Homo sapiens
gcgggcggaaccggcaggaag

SEQ ID NO: 16899 - DNA, 19 bp, Homo sapiens
gcggaaggcgagattgagg

SEQ ID NO: 16900 - DNA, 18 bp, Homo sapiens
cggaagttggggtaggag

SEQ ID NO: 16901 - DNA, 18 bp, Homo sapiens
aggggaggggagggcagg

SEQ ID NO: 16902 - DNA, 16 bp, Homo sapiens
agtggaggggaaggga

SEQ ID NO: 16903 - DNA, 24 bp, Homo sapiens
agcggggtgggaggggaagggaag

SEQ ID NO: 16904 - DNA, 20 bp, Homo sapiens
aggggaaggggctggggaag

SEQ ID NO: 16905 - DNA, 19 bp, Homo sapiens
agcgcaaggggaggagagg

SEQ ID NO: 16906 - DNA, 17 bp, Homo sapiens
ggtgggagagggcggaa

SEQ ID NO: 16907 - DNA, 20 bp, Homo sapiens
agggggaggggaatgtagga

SEQ ID NO: 16908 - DNA, 25 bp, Homo sapiens
agctggaaggagttggggcaggaag

SEQ ID NO: 16909 - DNA, 22 bp, Homo sapiens
aaacgggaggtgcagcaggaag

SEQ ID NO: 16910 - DNA, 18 bp, Homo sapiens
gaggggaaccccaggaag

SEQ ID NO: 16911 - DNA, 22 bp, Homo sapiens
gctgggcctggggagcaggaag

SEQ ID NO: 16912 - DNA, 18 bp, Homo sapiens
agctgagggtggagtagg

SEQ ID NO: 16913 - DNA, 17 bp, Homo sapiens
gcggggcgggaggagag

SEQ ID NO: 16914 - DNA, 19 bp, Homo sapiens
gcagagttagggcaggaag

SEQ ID NO: 16915 - DNA, 19 bp, Homo sapiens
aagggaagctcagcgggaa

SEQ ID NO: 16916 - DNA, 18 bp, Homo sapiens
aggcggcagtggcaggaa

SEQ ID NO: 16917 - DNA, 19 bp, Homo sapiens
aagtagaagggggagggga

SEQ ID NO: 16918 - DNA, 17 bp, Homo sapiens
ggggagggggagaggaa

SEQ ID NO: 16919 - DNA, 17 bp, Homo sapiens
ggtgggcagggcaggaa

SEQ ID NO: 16920 - DNA, 22 bp, Homo sapiens
aagaggaaggggaggagctagg

SEQ ID NO: 16921 - DNA, 20 bp, Homo sapiens
gcgaggaggacggagcggga

SEQ ID NO: 16922 - DNA, 22 bp, Homo sapiens
ggtggggcctctaggcaggaag

SEQ ID NO: 16923 - DNA, 22 bp, Homo sapiens
agtgaaaggggaggggaggaag

SEQ ID NO: 16924 - DNA, 20 bp, Homo sapiens
gcgggagtggaggagcgtgg

SEQ ID NO: 16925 - DNA, 21 bp, Homo sapiens
agaggaaagcggggcaggaag

SEQ ID NO: 16926 - DNA, 21 bp, Homo sapiens
aagggggaggggaggcacagg

SEQ ID NO: 16927 - DNA, 18 bp, Homo sapiens
gcgggagggaagggcagg

SEQ ID NO: 16928 - DNA, 18 bp, Homo sapiens
agcgggaggagggaggga

SEQ ID NO: 16929 - DNA, 19 bp, Homo sapiens
aagtgggtgggggggtgaa

SEQ ID NO: 16930 - DNA, 23 bp, Homo sapiens
agcagggagggggtgttggcggg

SEQ ID NO: 16931 - DNA, 19 bp, Homo sapiens
aggggaaggggggaggggg

SEQ ID NO: 16932 - DNA, 19 bp, Homo sapiens
aagcgagggggggccgagg

SEQ ID NO: 16933 - DNA, 22 bp, Homo sapiens
aagtgggaggagggaagcgagg

SEQ ID NO: 16934 - DNA, 62 bp, Fowl adenovirus A
cctgcctttcagcagctggttagcaacgggatctttgaacgtgttacaatgagctgtgcagg

SEQ ID NO: 16935 - DNA, 24 bp, Fowl adenovirus A
cagcagctggttagcaacgggatc

SEQ ID NO: 16936 - DNA, 18 bp, Fowl adenovirus A
tacaatgagctgtgcagg

SEQ ID NO: 16937 - DNA, 20 bp, Homo sapiens
ctgggtgttagcaatgggat

SEQ ID NO: 16938 - DNA, 18 bp, Homo sapiens
gcaggtggttagcaccag

SEQ ID NO: 16939 - DNA, 18 bp, Homo sapiens
gccagctaacagtgggat

SEQ ID NO: 16940 - DNA, 23 bp, Homo sapiens
cagcagccccccgtggcaacggg

SEQ ID NO: 16941 - DNA, 17 bp, Homo sapiens
gcagccggcggtgggat

SEQ ID NO: 16942 - DNA, 16 bp, Homo sapiens
tacaatgaattacaga

SEQ ID NO: 16943 - DNA, 18 bp, Homo sapiens
acaatgagctgtaacagg

SEQ ID NO: 16944 - DNA, 17 bp, Homo sapiens
tacaataaaaagccagg

SEQ ID NO: 16945 - DNA, 19 bp, Homo sapiens
tacaggtttaaggtgcagg

SEQ ID NO: 16946 - DNA, 17 bp, Homo sapiens
tacagagctgaggcagg

SEQ ID NO: 16947 - DNA, 18 bp, Homo sapiens
acaggggagctgtgcagg

SEQ ID NO: 16948 - DNA, 17 bp, Homo sapiens
tacaatgactatgaagg

SEQ ID NO: 16949 - DNA, 18 bp, Homo sapiens
tacagtaagcaagacagg

SEQ ID NO: 16950 - DNA, 18 bp, Homo sapiens
cacacttagctgtgcagg

SEQ ID NO: 16951 - DNA, 17 bp, Homo sapiens
tacaatgagtctaaagg

SEQ ID NO: 16952 - DNA, 21 bp, Homo sapiens
tacatgcagggctgtgcaggc

SEQ ID NO: 16953 - DNA, 18 bp, Homo sapiens
tgaatgagcttgtgtagg

SEQ ID NO: 16954 - DNA, 16 bp, Homo sapiens
cacagtattgtgcagg

SEQ ID NO: 16955 - DNA, 19 bp, Homo sapiens
tacagggtgccactgcagg

SEQ ID NO: 16956 - DNA, 17 bp, Homo sapiens
tacaggcagcatgcagg

SEQ ID NO: 16957 - DNA, 16 bp, Homo sapiens
tacaatgagtctgagg

SEQ ID NO: 16958 - DNA, 17 bp, Homo sapiens
tacagagctgaagcagg

SEQ ID NO: 16959 - DNA, 18 bp, Homo sapiens
acaatgagagtgagcagg

SEQ ID NO: 16960 - DNA, 16 bp, Homo sapiens
cacagtgagctgcagg

SEQ ID NO: 16961 - DNA, 19 bp, Homo sapiens
tacggcggacacgtgcagg

SEQ ID NO: 16962 - DNA, 18 bp, Homo sapiens
atgaggtatctgtgcagg

SEQ ID NO: 16963 - DNA, 18 bp, Homo sapiens
cacagtgggactgtgagg

SEQ ID NO: 16964 - DNA, 18 bp, Homo sapiens
tacaatgagccgagatgg

SEQ ID NO: 16965 - DNA, 17 bp, Homo sapiens
tacaatgaaagtgcagg

SEQ ID NO: 16966 - DNA, 18 bp, Homo sapiens
tacgataatatatgcagg

SEQ ID NO: 16967 - DNA, 20 bp, Homo sapiens
cacaatgagcccacgacagg

SEQ ID NO: 16968 - DNA, 16 bp, Homo sapiens
tacagaaaggtgcagg

SEQ ID NO: 16969 - DNA, 16 bp, Homo sapiens
tacaataagctacaag

SEQ ID NO: 16970 - DNA, 17 bp, Homo sapiens
cacaatgacataacagg

SEQ ID NO: 16971 - DNA, 16 bp, Homo sapiens
cacaatgagctgcagg

SEQ ID NO: 16972 - DNA, 18 bp, Homo sapiens
cacaggagcctgtgcggg

SEQ ID NO: 16973 - DNA, 18 bp, Homo sapiens
acagctgctctgtgcagg

SEQ ID NO: 16974 - DNA, 18 bp, Homo sapiens
cacaatgagccccacagg

SEQ ID NO: 16975 - DNA, 19 bp, Homo sapiens
tacaatgaacacacactgg

SEQ ID NO: 16976 - DNA, 17 bp, Homo sapiens
tacaatgtatgtacagg

SEQ ID NO: 16977 - DNA, 15 bp, Homo sapiens
tacaatgatggcagg

SEQ ID NO: 16978 - DNA, 18 bp, Homo sapiens
tacaataagcttcaaagg

SEQ ID NO: 16979 - DNA, 78 bp, Fowl adenovirus A
gccgctcttagcacaaaatcaaaaacaaatctagccaccgcagtctgtagagacttttgagttgaaaaagtaagcggc

SEQ ID NO: 16980 - DNA, 24 bp, Fowl adenovirus A
tagcacaaaatcaaaaacaaatct

SEQ ID NO: 16981 - DNA, 24 bp, Fowl adenovirus A
tgtagagacttttgagttgaaaaa

SEQ ID NO: 16982 - DNA, 19 bp, Homo sapiens
tagcataaagacaaaaaca

SEQ ID NO: 16983 - DNA, 21 bp, Homo sapiens
gcacaggcattgaaaacaaat

SEQ ID NO: 16984 - DNA, 19 bp, Homo sapiens
tgcggagccaggagttgaa

SEQ ID NO: 16985 - DNA, 19 bp, Homo sapiens
tggggagactccccagttg

SEQ ID NO: 16986 - DNA, 21 bp, Homo sapiens
tgtagaaatttttgataagaa

SEQ ID NO: 16987 - DNA, 22 bp, Homo sapiens
gagcgctttttgagttgaaaaa

SEQ ID NO: 16988 - DNA, 21 bp, Homo sapiens
tgtagagacttctggagtaga

SEQ ID NO: 16989 - DNA, 17 bp, Homo sapiens
tggagagacttgatttg

SEQ ID NO: 16990 - DNA, 18 bp, Homo sapiens
gaactcttttgagttgaa

SEQ ID NO: 16991 - DNA, 20 bp, Homo sapiens
tgcagagaggctgcgggttg

SEQ ID NO: 16992 - DNA, 20 bp, Homo sapiens
tagggacttttgggatctga

SEQ ID NO: 16993 - DNA, 23 bp, Homo sapiens
tagagactttcttttgtggaaaa

SEQ ID NO: 16994 - DNA, 21 bp, Homo sapiens
tgtagagaaagtagttgaaaa

SEQ ID NO: 16995 - DNA, 60 bp, Fowl adenovirus A
tttcaataactctcacttttttgctagaggcaggctcaacaatgtctggagttgttgggg

SEQ ID NO: 16996 - DNA, 24 bp, Fowl adenovirus A
tcaataactctcacttttttgcta

SEQ ID NO: 16997 - DNA, 24 bp, Fowl adenovirus A
aggcaggctcaacaatgtctggag

SEQ ID NO: 16998 - DNA, 19 bp, Homo sapiens
tcagggctctcaccgggct

SEQ ID NO: 16999 - DNA, 17 bp, Homo sapiens
tcgataatctcactcct

SEQ ID NO: 17000 - DNA, 22 bp, Homo sapiens
tcaataactctgctgaccccct

SEQ ID NO: 17001 - DNA, 21 bp, Homo sapiens
tcagtgactctcaccagcatg

SEQ ID NO: 17002 - DNA, 20 bp, Homo sapiens
tcagtaactctcctccttta

SEQ ID NO: 17003 - DNA, 21 bp, Homo sapiens
tcagaactttcactcccacta

SEQ ID NO: 17004 - DNA, 17 bp, Homo sapiens
agcaggctcgggtctgg

SEQ ID NO: 17005 - DNA, 18 bp, Homo sapiens
aggcaggctcagcacgga

SEQ ID NO: 17006 - DNA, 21 bp, Homo sapiens
aggcaggcgcgatggtgggag

SEQ ID NO: 17007 - DNA, 21 bp, Homo sapiens
aggcaggattgaagcctggag

SEQ ID NO: 17008 - DNA, 22 bp, Homo sapiens
ggcaagctcaagcctgctggag

SEQ ID NO: 17009 - DNA, 20 bp, Homo sapiens
ggtggctcagcagggtggag

SEQ ID NO: 17010 - DNA, 15 bp, Homo sapiens
ggcgggccagcctgg

SEQ ID NO: 17011 - DNA, 21 bp, Homo sapiens
aggagagcgtggtgtctggag

SEQ ID NO: 17012 - DNA, 18 bp, Homo sapiens
ggcaggatgttgtctgga

SEQ ID NO: 17013 - DNA, 16 bp, Homo sapiens
agcaggccatgtttgg

SEQ ID NO: 17014 - DNA, 24 bp, Homo sapiens
aggcaggccagtcccatgctggag

SEQ ID NO: 17015 - DNA, 18 bp, Homo sapiens
aggcaggctcagcgatgg

SEQ ID NO: 17016 - DNA, 21 bp, Homo sapiens
aggcaggccggcaggcgggag

SEQ ID NO: 17017 - DNA, 21 bp, Homo sapiens
ggtgggttcgggagcccggag

SEQ ID NO: 17018 - DNA, 19 bp, Homo sapiens
aggcaggctggctttctgg

SEQ ID NO: 17019 - DNA, 17 bp, Homo sapiens
ggcaggctgagcactgg

SEQ ID NO: 17020 - DNA, 21 bp, Homo sapiens
aggcaggcttgaaatcctcag

SEQ ID NO: 17021 - DNA, 21 bp, Homo sapiens
aggcaggccgatgcagcctgg

SEQ ID NO: 17022 - DNA, 23 bp, Homo sapiens
ggcaggctgcagcttctctggag

SEQ ID NO: 17023 - DNA, 17 bp, Homo sapiens
ggcaggcttgtcaatga

SEQ ID NO: 17024 - DNA, 16 bp, Homo sapiens
aggcaggctgggctgg

SEQ ID NO: 17025 - DNA, 16 bp, Homo sapiens
ggcaggctgggcagag

SEQ ID NO: 17026 - DNA, 20 bp, Homo sapiens
ggagggcgcagtgtctggag

SEQ ID NO: 17027 - DNA, 18 bp, Homo sapiens
ggccaggtccatgtctgg

SEQ ID NO: 17028 - DNA, 16 bp, Homo sapiens
caggtgcaatgtctgg

SEQ ID NO: 17029 - DNA, 18 bp, Homo sapiens
aggcaggctcggggctgg

SEQ ID NO: 17030 - DNA, 19 bp, Homo sapiens
ggccaggctcaggccctgg

SEQ ID NO: 17031 - DNA, 20 bp, Homo sapiens
ggcaggctgagtaaatgggg

SEQ ID NO: 17032 - DNA, 65 bp, Human herpesvirus 6B
aatggtgctattagaatttacaaaactggtaatccacatagttgtaaagttaaaattgttccgtt

SEQ ID NO: 17033 - DNA, 24 bp, Human herpesvirus 6B
tattagaatttacaaaactggtaa

SEQ ID NO: 17034 - DNA, 23 bp, Human herpesvirus 6B
tgtaaagttaaaattgttccgtt

SEQ ID NO: 17035 - DNA, 21 bp, Homo sapiens
tgtaaagttaaattggccatt

SEQ ID NO: 17036 - DNA, 20 bp, Homo sapiens
tgtagggttaatgttccatt

SEQ ID NO: 17037 - DNA, 68 bp, Human herpesvirus 6
gtcgctcatgcggacagtcaaacattcattaacacgcaggatgttgcattctctcacagcatgatgac

SEQ ID NO: 17038 - DNA, 19 bp, Human herpesvirus 6
tctctcacagcatgatgac

SEQ ID NO: 17039 - DNA, 24 bp, Human herpesvirus 6
gctcatgcggacagtcaaacattc

SEQ ID NO: 17040 - DNA, 19 bp, Homo sapiens
tctccacagcaaggatgac

SEQ ID NO: 17041 - DNA, 18 bp, Homo sapiens
tctcccacagcaagggac

SEQ ID NO: 17042 - DNA, 17 bp, Homo sapiens
tctctcacattaatgac

SEQ ID NO: 17043 - DNA, 18 bp, Homo sapiens
tctttccaagatgatgac

SEQ ID NO: 17044 - DNA, 20 bp, Homo sapiens
cctctcacaggctggggtga

SEQ ID NO: 17045 - DNA, 16 bp, Homo sapiens
tctctaacataatgac

SEQ ID NO: 17046 - DNA, 17 bp, Homo sapiens
tctcttaccacaatgac

SEQ ID NO: 17047 - DNA, 18 bp, Homo sapiens
tccctcacagacacagac

SEQ ID NO: 17048 - DNA, 18 bp, Homo sapiens
tccctcacaggcgctgac

SEQ ID NO: 17049 - DNA, 18 bp, Homo sapiens
tctctcacagacacagac

SEQ ID NO: 17050 - DNA, 18 bp, Homo sapiens
ctcttacaaacacgatga

SEQ ID NO: 17051 - DNA, 14 bp, Homo sapiens
tctctccatgatga

SEQ ID NO: 17052 - DNA, 18 bp, Homo sapiens
tcatgcaagtcaaatatt

SEQ ID NO: 17053 - DNA, 23 bp, Homo sapiens
gccatcacaaacagttaaacatt

SEQ ID NO: 17054 - DNA, 22 bp, Homo sapiens
gcttgtgcagtagacaaacatt

SEQ ID NO: 17055 - DNA, 19 bp, Homo sapiens
tcatatccagtcaaacatt

SEQ ID NO: 17056 - DNA, 28 bp, Homo sapiens
gccatgcgggcgggcaggctagacattc

SEQ ID NO: 17057 - DNA, 78 bp, Human herpesvirus 6
gcgttcatattagactacaaacctaatgataataacaaaaatcatttatattttacaagttttaacaatattgaacgc

SEQ ID NO: 17058 - DNA, 24 bp, Human herpesvirus 6
tattagactacaaacctaatgata

SEQ ID NO: 17059 - DNA, 24 bp, Human herpesvirus 6
tacaagttttaacaatattgaacg

SEQ ID NO: 17060 - DNA, 19 bp, Homo sapiens
attaaaattaaacctaatg

SEQ ID NO: 17061 - DNA, 19 bp, Homo sapiens
tacaaatgtcaatattgaa

SEQ ID NO: 17062 - DNA, 22 bp, Homo sapiens
tacaagttgtaacagttcagaa

SEQ ID NO: 17063 - DNA, 18 bp, Homo sapiens
tacaagtttagtaacaat

SEQ ID NO: 17064 - DNA, 72 bp, Human herpesvirus 6
ttcgaatcgccccttttccaaaacatgtgaagaccttcttctcaaaccttgacaaaacctatttgattcgag

SEQ ID NO: 17065 - DNA, 24 bp, Human herpesvirus 6
tcaaaccttgacaaaacctatttg

SEQ ID NO: 17066 - DNA, 24 bp, Human herpesvirus 6
aatcgccccttttccaaaacatgt

SEQ ID NO: 17067 - DNA, 17 bp, Homo sapiens
tcaaacctgacgagacc

SEQ ID NO: 17068 - DNA, 21 bp, Homo sapiens
gccgcctctaagcaaacatgt

SEQ ID NO: 17069 - DNA, 23 bp, Homo sapiens
tcccctccttttttaaggcatgt

SEQ ID NO: 17070 - DNA, 91 bp, Human herpesvirus 6
gcgaaatgtattcagattcgttttcaggtccgaacgccacaaactcaacaacgtaagtgtcgtctcgattacgcctgattatacatttcgt

SEQ ID NO: 17071 - DNA, 24 bp, Human herpesvirus 6
aatgtattcagattcgttttcagg

SEQ ID NO: 17072 - DNA, 24 bp, Human herpesvirus 6
gtcgtctcgattacgcctgattat

SEQ ID NO: 17073 - DNA, 23 bp, Homo sapiens
atgtattcggctgaaagttcagg

SEQ ID NO: 17074 - DNA, 14 bp, Homo sapiens
tgtttcagatttca

SEQ ID NO: 17075 - DNA, 21 bp, Homo sapiens
tgtattcagttttgtcaatgg

SEQ ID NO: 17076 - DNA, 78 bp, Gallid herpesvirus 2
tcgtcgagatcgtgatttggagaatataacgttggaagcactaacagttccctggcgtctgcaattccgtgtcgatga

SEQ ID NO: 17077 - DNA, 21 bp, Gallid herpesvirus 2
tctgcaattccgtgtcgatga

SEQ ID NO: 17078 - DNA, 24 bp, Gallid herpesvirus 2
atcgtgatttggagaatataacgt

SEQ ID NO: 17079 - DNA, 19 bp, Homo sapiens
tctgcggttccacgtgtga

SEQ ID NO: 17080 - DNA, 16 bp, Homo sapiens
ctgcaattctttcatg

SEQ ID NO: 17081 - DNA, 19 bp, Homo sapiens
tctgcaatgctgtcgcctg

SEQ ID NO: 17082 - DNA, 21 bp, Homo sapiens
tctgcaatattggtgcgatga

SEQ ID NO: 17083 - DNA, 20 bp, Homo sapiens
tgcaactctggcctatatga

SEQ ID NO: 17084 - DNA, 20 bp, Homo sapiens
tctgcaactttcaggaatga

SEQ ID NO: 17085 - DNA, 19 bp, Homo sapiens
gcaatgccaatgtcgatga

SEQ ID NO: 17086 - DNA, 20 bp, Homo sapiens
tctgcaattatgtaaccctg

SEQ ID NO: 17087 - DNA, 65 bp, Gallid herpesvirus 2
cgcgttaccaacaattgtgtgatctcgttactgaaatcggatttaaagcgcaaatatcaaacgtg

SEQ ID NO: 17088 - DNA, 24 bp, Gallid herpesvirus 2
aattgtgtgatctcgttactgaaa

SEQ ID NO: 17089 - DNA, 24 bp, Gallid herpesvirus 2
tttaaagcgcaaatatcaaacgtg

SEQ ID NO: 17090 - DNA, 18 bp, Homo sapiens
gtatgtattgttactgaa

SEQ ID NO: 17091 - DNA, 16 bp, Homo sapiens
aattgtgtgtctctga

SEQ ID NO: 17092 - DNA, 19 bp, Homo sapiens
tgtgaagaaattactgaaa

SEQ ID NO: 17093 - DNA, 18 bp, Homo sapiens
tgtgattgtttactgaaa

SEQ ID NO: 17094 - DNA, 15 bp, Homo sapiens
aattgtgtggttact

SEQ ID NO: 17095 - DNA, 18 bp, Homo sapiens
tttaaagcgcagatgtca

SEQ ID NO: 17096 - DNA, 94 bp, Gallid herpesvirus 2
tgcatatttggacgctcatccatgaatctacgaagcttgattataatccccagtagatggcttccaaattcctggctaactattactatatgca

SEQ ID NO: 17097 - DNA, 24 bp, Gallid herpesvirus 2
tccatgaatctacgaagcttgatt

SEQ ID NO: 17098 - DNA, 24 bp, Gallid herpesvirus 2
tggcttccaaattcctggctaact

SEQ ID NO: 17099 - DNA, 23 bp, Homo sapiens
tccatagttagtgtggcttgatt

SEQ ID NO: 17100 - DNA, 18 bp, Homo sapiens
catgaatctgcggatctt

SEQ ID NO: 17101 - DNA, 19 bp, Homo sapiens
gcttccaagttcccaggct

SEQ ID NO: 17102 - DNA, 21 bp, Homo sapiens
ggcttccaagttcttagataa

SEQ ID NO: 17103 - DNA, 20 bp, Homo sapiens
tggtttctgaagtcctaacc

SEQ ID NO: 17104 - DNA, 19 bp, Homo sapiens
tggcttcccaattctgtct

SEQ ID NO: 17105 - DNA, 24 bp, Homo sapiens
tggcttccagatctgaaggaagct

SEQ ID NO: 17106 - DNA, 18 bp, Homo sapiens
tggttccaaattatctaa

SEQ ID NO: 17107 - DNA, 23 bp, Homo sapiens
tggcatttcaaatagacctaact

SEQ ID NO: 17108 - DNA, 16 bp, Homo sapiens
tggcttccagatttgg

SEQ ID NO: 17109 - DNA, 24 bp, Homo sapiens
tggcttccagattgtttgtgccaa

SEQ ID NO: 17110 - DNA, 15 bp, Homo sapiens
ggcatttctggctaa

SEQ ID NO: 17111 - DNA, 20 bp, Homo sapiens
tggctccaaattgcttggct

SEQ ID NO: 17112 - DNA, 21 bp, Homo sapiens
tggcttccaggctccctgact

SEQ ID NO: 17113 - DNA, 130 bp, Paramecium bursaria Chlorella virus 1
cgtaaatgcaggggttaatcgggcggatggggaccagcgcagggagcgcggaaggagtcctgctctgaaaaaaatgagggggaaccgtgagaaagcgttccccgcagttcgcatcgcttcttgccccccg

SEQ ID NO: 17114 - DNA, 24 bp, Paramecium bursaria Chlorella virus 1
agggagcgcggaaggagtcctgct

SEQ ID NO: 17115 - DNA, 19 bp, Paramecium bursaria Chlorella virus 1
catcgcttcttgccccccg

SEQ ID NO: 17116 - DNA, 19 bp, Homo sapiens
agggagcgagggaggcggc

SEQ ID NO: 17117 - DNA, 26 bp, Homo sapiens
agggagcgtggaggaggcaaatcctg

SEQ ID NO: 17118 - DNA, 23 bp, Homo sapiens
agggagcgagggggccgcttgct

SEQ ID NO: 17119 - DNA, 23 bp, Homo sapiens
agggatggcgatggggtcctgct

SEQ ID NO: 17120 - DNA, 23 bp, Homo sapiens
ggcgagcgcggggggccggggct

SEQ ID NO: 17121 - DNA, 21 bp, Homo sapiens
agggaggcggaaggcccagct

SEQ ID NO: 17122 - DNA, 20 bp, Homo sapiens
agggggctggaaggaagcct

SEQ ID NO: 17123 - DNA, 21 bp, Homo sapiens
gggggtggggaaggaaaagct

SEQ ID NO: 17124 - DNA, 16 bp, Homo sapiens
gggtgcggggagggtc

SEQ ID NO: 17125 - DNA, 24 bp, Homo sapiens
aggggctgtggagtccccactgct

SEQ ID NO: 17126 - DNA, 18 bp, Homo sapiens
cgctgctgtggccccccg

SEQ ID NO: 17127 - DNA, 18 bp, Homo sapiens
ccgctcccgggcctcccg

SEQ ID NO: 17128 - DNA, 18 bp, Homo sapiens
ccgctccccggcctcccg

SEQ ID NO: 17129 - DNA, 18 bp, Homo sapiens
caccgcttggttcttccc

SEQ ID NO: 17130 - DNA, 20 bp, Homo sapiens
catcgcttggcctctttccg

SEQ ID NO: 17131 - DNA, 18 bp, Homo sapiens
caccgcttttcagtcccc

SEQ ID NO: 17132 - DNA, 18 bp, Homo sapiens
caccgccccggcccctcg

SEQ ID NO: 17133 - DNA, 22 bp, Homo sapiens
caccgcttctcgcgcgcccccg

SEQ ID NO: 17134 - DNA, 18 bp, Homo sapiens
ccgctccccggtcccccg

SEQ ID NO: 17135 - DNA, 20 bp, Homo sapiens
cagcgcccgcccgccctccg

SEQ ID NO: 17136 - DNA, 18 bp, Homo sapiens
cgctcgctcgcctctccg

SEQ ID NO: 17137 - DNA, 18 bp, Homo sapiens
catcgctcccatccctcg

SEQ ID NO: 17138 - DNA, 19 bp, Homo sapiens
caccgcccgcccccccccg

SEQ ID NO: 17139 - DNA, 18 bp, Homo sapiens
cactgcttctgccccccg

SEQ ID NO: 17140 - DNA, 18 bp, Homo sapiens
caccggcccagccccccg

SEQ ID NO: 17141 - DNA, 18 bp, Homo sapiens
catctgccccgcccctcg

SEQ ID NO: 17142 - DNA, 19 bp, Homo sapiens
catcgccctcggcccctcg

SEQ ID NO: 17143 - DNA, 19 bp, Homo sapiens
cgcttctcgtcgcccctcg

SEQ ID NO: 17144 - DNA, 15 bp, Homo sapiens
atcccccctcccccg

SEQ ID NO: 17145 - DNA, 20 bp, Homo sapiens
catcgcttcctagcagcccg

SEQ ID NO: 17146 - DNA, 18 bp, Homo sapiens
tcgcccacttgcccctcg

SEQ ID NO: 17147 - DNA, 18 bp, Homo sapiens
cgctgtccccgcccctcg

SEQ ID NO: 17148 - DNA, 14 bp, Homo sapiens
caccgcctctcccc

SEQ ID NO: 17149 - DNA, 16 bp, Homo sapiens
caccgttcctcctccc

SEQ ID NO: 17150 - DNA, 18 bp, Homo sapiens
catcgcccgcctttcccg

SEQ ID NO: 17151 - DNA, 16 bp, Homo sapiens
caccgcccgccccccg

SEQ ID NO: 17152 - DNA, 18 bp, Homo sapiens
cgcttctctcctcctccg

SEQ ID NO: 17153 - DNA, 14 bp, Homo sapiens
catcaccctccccc

SEQ ID NO: 17154 - DNA, 119 bp, Paramecium bursaria Chlorella virus 1
tgagagattcctctgtgtgttttttaccataaaaagagttattagttcccatttgagatttacttattttactcttaacttcttctttttgtggtttaccatacatatgacttttttca

SEQ ID NO: 17155 - DNA, 24 bp, Paramecium bursaria Chlorella virus 1
taccataaaaagagttattagttc

SEQ ID NO: 17156 - DNA, 24 bp, Paramecium bursaria Chlorella virus 1
tactcttaacttcttctttttgtg

SEQ ID NO: 17157 - DNA, 20 bp, Homo sapiens
ccattaaaagaggatgagtt

SEQ ID NO: 17158 - DNA, 19 bp, Homo sapiens
taccacagaaagggttatt

SEQ ID NO: 17159 - DNA, 17 bp, Homo sapiens
taccataagaaagttat

SEQ ID NO: 17160 - DNA, 25 bp, Homo sapiens
taccacaaaaggagttaaggcagtt

SEQ ID NO: 17161 - DNA, 21 bp, Homo sapiens
ctcttaattttttctcctctt

SEQ ID NO: 17162 - DNA, 18 bp, Homo sapiens
tcttgactccttttcttg

SEQ ID NO: 17163 - DNA, 22 bp, Homo sapiens
ctcctggcttctgtggcttgtg

SEQ ID NO: 17164 - DNA, 20 bp, Homo sapiens
ctcttaatctactttttgtg

SEQ ID NO: 17165 - DNA, 79 bp, Paramecium bursaria Chlorella virus 1
gggagagaaataccgacggccggacagagcgaattattaagcacccaacgctcacgccaacacgtcccacctctttccc

SEQ ID NO: 17166 - DNA, 24 bp, Paramecium bursaria Chlorella virus 1
tcacgccaacacgtcccacctctt

SEQ ID NO: 17167 - DNA, 24 bp, Paramecium bursaria Chlorella virus 1
agagaaataccgacggccggacag

SEQ ID NO: 17168 - DNA, 21 bp, Homo sapiens
tcagctcaaatcccacctctt

SEQ ID NO: 17169 - DNA, 23 bp, Homo sapiens
cgccgccacaatctccacctctt

SEQ ID NO: 17170 - DNA, 18 bp, Homo sapiens
tcacgccaatgtgctccc

SEQ ID NO: 17171 - DNA, 18 bp, Homo sapiens
gcccagctcccacctctt

SEQ ID NO: 17172 - DNA, 22 bp, Homo sapiens
tcattcacatgttccacctctt

SEQ ID NO: 17173 - DNA, 20 bp, Homo sapiens
actccaacctaccacctctt

SEQ ID NO: 17174 - DNA, 19 bp, Homo sapiens
gcccaggaatccacctctt

SEQ ID NO: 17175 - DNA, 20 bp, Homo sapiens
agagaaatgtggcgacttgg

SEQ ID NO: 17176 - DNA, 19 bp, Homo sapiens
agagaaatactagtgacag

SEQ ID NO: 17177 - DNA, 21 bp, Homo sapiens
agagaaatatgtgacaggtag

SEQ ID NO: 17178 - DNA, 21 bp, Homo sapiens
agagaaattccgtcggggtgg

SEQ ID NO: 17179 - DNA, 23 bp, Homo sapiens
agagagggttgatgcccggacag

SEQ ID NO: 17180 - DNA, 19 bp, Homo sapiens
gagagaccgacgggattgg

SEQ ID NO: 17181 - DNA, 20 bp, Homo sapiens
aaagaaatactggcttcaaa

SEQ ID NO: 17182 - DNA, 16 bp, Homo sapiens
gagaggcagccggaca

SEQ ID NO: 17183 - DNA, 69 bp, Variola virus
atgaagttaatgatacacactatactgtcgaatttgatagggacaaagtagttgacacgtttatttcgt

SEQ ID NO: 17184 - DNA, 24 bp, Variola virus
ttaatgatacacactatactgtcg

SEQ ID NO: 17185 - DNA, 24 bp, Vaccinia virus
caaagtagttgacacgtttatttc

SEQ ID NO: 17186 - DNA, 17 bp, Homo sapiens
tggtaccactatactgt

SEQ ID NO: 17187 - DNA, 23 bp, Homo sapiens
agcaactggggcatgtttatttc

SEQ ID NO: 17188 - DNA, 20 bp, Homo sapiens
aaagagttgacattacattt

SEQ ID NO: 17189 - DNA, 19 bp, Homo sapiens
agtcaaggacgtttatttc

SEQ ID NO: 17190 - DNA, 20 bp, Homo sapiens
agtccgcgcacgtttatttc

SEQ ID NO: 17191 - DNA, 20 bp, Homo sapiens
aaatagttgacactcaattt

SEQ ID NO: 17192 - DNA, 113 bp, Variola virus
cgctcccgcggccccgccccccacgcccgccgcgcgcgcgcacgccgcccggaccgccgcccgccttttttgcgcgcgcgcgcgcccgcggggggcccgggctgccacaggtg

SEQ ID NO: 17193 - DNA, 24 bp, Variola virus
ccgcggccccgccccccacgcccg

SEQ ID NO: 17194 - DNA, 24 bp, Variola virus
tgcgcgcgcgcgcgcccgcggggg

SEQ ID NO: 17195 - DNA, 19 bp, Homo sapiens
cccggccccgctcggctcc

SEQ ID NO: 17196 - DNA, 22 bp, Homo sapiens
ccttggccttgctccatccccg

SEQ ID NO: 17197 - DNA, 16 bp, Homo sapiens
ccgcggcctcgcagcc

SEQ ID NO: 17198 - DNA, 16 bp, Homo sapiens
ccgcgacctccacgcc

SEQ ID NO: 17199 - DNA, 21 bp, Homo sapiens
ccgtgccccgcctcgcgctcg

SEQ ID NO: 17200 - DNA, 25 bp, Homo sapiens
ccgcctcgcgctcgcccctcgtgcc

SEQ ID NO: 17201 - DNA, 18 bp, Homo sapiens
cggcgtcctccacgcccg

SEQ ID NO: 17202 - DNA, 21 bp, Homo sapiens
ccgcgccccgcccaccgcccg

SEQ ID NO: 17203 - DNA, 24 bp, Homo sapiens
ccgcggcccttcccagctggctcg

SEQ ID NO: 17204 - DNA, 21 bp, Homo sapiens
ccgcggccctcgtgtcgcccg

SEQ ID NO: 17205 - DNA, 20 bp, Homo sapiens
cccggccccgccccccctcg

SEQ ID NO: 17206 - DNA, 19 bp, Homo sapiens
ccgccgtcccgcctcagcc

SEQ ID NO: 17207 - DNA, 18 bp, Homo sapiens
cgcggccccgcccggccc

SEQ ID NO: 17208 - DNA, 18 bp, Homo sapiens
cgtggccccgccctgccc

SEQ ID NO: 17209 - DNA, 19 bp, Homo sapiens
ccgcggcccggcccggccc

SEQ ID NO: 17210 - DNA, 16 bp, Homo sapiens
cggccccgctcccagc

SEQ ID NO: 17211 - DNA, 20 bp, Homo sapiens
cccggctccgcccccctcac

SEQ ID NO: 17212 - DNA, 18 bp, Homo sapiens
cacggccccgctttcacc

SEQ ID NO: 17213 - DNA, 17 bp, Homo sapiens
cggccccgccccggccc

SEQ ID NO: 17214 - DNA, 22 bp, Homo sapiens
ccgcgcctccgggccgcgtccg

SEQ ID NO: 17215 - DNA, 22 bp, Homo sapiens
gcagccccgctcccgccatgcc

SEQ ID NO: 17216 - DNA, 18 bp, Homo sapiens
cccggccccgccccgccc

SEQ ID NO: 17217 - DNA, 18 bp, Homo sapiens
ccgcgctccgcccggccc

SEQ ID NO: 17218 - DNA, 16 bp, Homo sapiens
gcgccccgcccggccc

SEQ ID NO: 17219 - DNA, 26 bp, Homo sapiens
ccgcgcttccgctccccactctcccg

SEQ ID NO: 17220 - DNA, 18 bp, Homo sapiens
ccgcgtccccgcccagca

SEQ ID NO: 17221 - DNA, 21 bp, Homo sapiens
ccgtggctcggcccttcctcg

SEQ ID NO: 17222 - DNA, 19 bp, Homo sapiens
ccgcgctccgcccgcatcc

SEQ ID NO: 17223 - DNA, 20 bp, Homo sapiens
ccgcggccgccgcctctcca

SEQ ID NO: 17224 - DNA, 19 bp, Homo sapiens
ccgtgcccccgccccgggc

SEQ ID NO: 17225 - DNA, 17 bp, Homo sapiens
cgcggccctgcagcgcc

SEQ ID NO: 17226 - DNA, 20 bp, Homo sapiens
cgggcccccgcccatgcccg

SEQ ID NO: 17227 - DNA, 23 bp, Homo sapiens
cccggccccgcccctactgtccg

SEQ ID NO: 17228 - DNA, 24 bp, Homo sapiens
ccggggctccagaggccacgcccg

SEQ ID NO: 17229 - DNA, 18 bp, Homo sapiens
cccggccccgctccccac

SEQ ID NO: 17230 - DNA, 27 bp, Homo sapiens
ccgcggcccccgctccacgcacgcccg

SEQ ID NO: 17231 - DNA, 15 bp, Homo sapiens
ggccccgccccaccc

SEQ ID NO: 17232 - DNA, 17 bp, Homo sapiens
ccgcggccccgccgcgc

SEQ ID NO: 17233 - DNA, 19 bp, Homo sapiens
cctcggccccgctgcgccc

SEQ ID NO: 17234 - DNA, 16 bp, Homo sapiens
gcgaccccgctgcgcc

SEQ ID NO: 17235 - DNA, 19 bp, Homo sapiens
ccgccggccctgcccgtcc

SEQ ID NO: 17236 - DNA, 18 bp, Homo sapiens
ccgcggccgccgccctcc

SEQ ID NO: 17237 - DNA, 29 bp, Homo sapiens
cgcggctcctgctcgtctcccgcgctcgc

SEQ ID NO: 17238 - DNA, 20 bp, Homo sapiens
ccgcgcccccgcccccgccc

SEQ ID NO: 17239 - DNA, 22 bp, Homo sapiens
cctcggccccgcgccgcgctcg

SEQ ID NO: 17240 - DNA, 19 bp, Homo sapiens
ccgtgcccctgccttgcac

SEQ ID NO: 17241 - DNA, 20 bp, Homo sapiens
gcgccccgccggcgcgctcg

SEQ ID NO: 17242 - DNA, 18 bp, Homo sapiens
ccgccgccgcccgcgccc

SEQ ID NO: 17243 - DNA, 22 bp, Homo sapiens
ccgcggcctcccggggggcccg

SEQ ID NO: 17244 - DNA, 17 bp, Homo sapiens
gcggccccgcctcggcc

SEQ ID NO: 17245 - DNA, 18 bp, Homo sapiens
ccgcgccccgcctccgcg

SEQ ID NO: 17246 - DNA, 24 bp, Homo sapiens
ccctgcccgcgccccccgcgcccg

SEQ ID NO: 17247 - DNA, 19 bp, Homo sapiens
gcggccccgcccgaggccc

SEQ ID NO: 17248 - DNA, 26 bp, Homo sapiens
ccgcggccgccgctgagctacgtgcc

SEQ ID NO: 17249 - DNA, 17 bp, Homo sapiens
ccgggccccgcgtcgcc

SEQ ID NO: 17250 - DNA, 18 bp, Homo sapiens
ccagcgggcccccacgcc

SEQ ID NO: 17251 - DNA, 20 bp, Homo sapiens
gcgcccccgccccgcccccg

SEQ ID NO: 17252 - DNA, 22 bp, Homo sapiens
ccgcgagcttcgccttgacccc

SEQ ID NO: 17253 - DNA, 20 bp, Homo sapiens
ccgcgccctcgccctcatcg

SEQ ID NO: 17254 - DNA, 15 bp, Homo sapiens
cggcgctccacgccc

SEQ ID NO: 17255 - DNA, 17 bp, Homo sapiens
gcggccccgccttggcc

SEQ ID NO: 17256 - DNA, 21 bp, Homo sapiens
cccggccccgtttgggcctcg

SEQ ID NO: 17257 - DNA, 21 bp, Homo sapiens
cctggccttgtctcccacacc

SEQ ID NO: 17258 - DNA, 21 bp, Homo sapiens
ccgcgctgcgctctgtgcccg

SEQ ID NO: 17259 - DNA, 22 bp, Homo sapiens
ccgcggccgccgctcctgggcc

SEQ ID NO: 17260 - DNA, 24 bp, Homo sapiens
ccgggctccggcgcctcacgcccg

SEQ ID NO: 17261 - DNA, 22 bp, Homo sapiens
cgcggtcctgcttcccacaccc

SEQ ID NO: 17262 - DNA, 21 bp, Homo sapiens
cctggctcgtgtccccacgcc

SEQ ID NO: 17263 - DNA, 23 bp, Homo sapiens
gcgccccgccccagcgaagcccg

SEQ ID NO: 17264 - DNA, 21 bp, Homo sapiens
ccgcggccccgccaggcctcg

SEQ ID NO: 17265 - DNA, 18 bp, Homo sapiens
ccgcggctccacccgtcc

SEQ ID NO: 17266 - DNA, 19 bp, Homo sapiens
cctggccccgccccggccc

SEQ ID NO: 17267 - DNA, 31 bp, Homo sapiens
ccggggccccgcgtgcgtcctccgcgcccgc

SEQ ID NO: 17268 - DNA, 26 bp, Homo sapiens
ccgcgctctgcccctcccccagctcg

SEQ ID NO: 17269 - DNA, 20 bp, Homo sapiens
gcggccccgctccggctccg

SEQ ID NO: 17270 - DNA, 23 bp, Homo sapiens
ccgcggccgccgccttctcctcg

SEQ ID NO: 17271 - DNA, 21 bp, Homo sapiens
ccggggccccgcccgcctccg

SEQ ID NO: 17272 - DNA, 18 bp, Homo sapiens
ccgcgccccgcccccacg

SEQ ID NO: 17273 - DNA, 20 bp, Homo sapiens
cgggccccgccgtgcgcccg

SEQ ID NO: 17274 - DNA, 23 bp, Homo sapiens
ccgcggcccgcgctcccggtgcc

SEQ ID NO: 17275 - DNA, 22 bp, Homo sapiens
ccacggtctccggccgcgcccg

SEQ ID NO: 17276 - DNA, 19 bp, Homo sapiens
cccggccccgcctcccccg

SEQ ID NO: 17277 - DNA, 16 bp, Homo sapiens
gcgtccccgcccgccc

SEQ ID NO: 17278 - DNA, 24 bp, Homo sapiens
gctgcccacgccgtcctccgtgcc

SEQ ID NO: 17279 - DNA, 24 bp, Homo sapiens
ccgtggctcctgcctccactcacc

SEQ ID NO: 17280 - DNA, 18 bp, Homo sapiens
cgggccccgccgccgccc

SEQ ID NO: 17281 - DNA, 19 bp, Homo sapiens
cctggccctgtccatgccc

SEQ ID NO: 17282 - DNA, 19 bp, Homo sapiens
ccgcgcccgccccgcgccc

SEQ ID NO: 17283 - DNA, 21 bp, Homo sapiens
ccgcggctcggcccggccccc

SEQ ID NO: 17284 - DNA, 18 bp, Homo sapiens
ccgccgccagcccacgcc

SEQ ID NO: 17285 - DNA, 21 bp, Homo sapiens
ccgcggcctccgctccacacc

SEQ ID NO: 17286 - DNA, 18 bp, Homo sapiens
ccgcggccctgctgcccc

SEQ ID NO: 17287 - DNA, 19 bp, Homo sapiens
ccgcggccgccgcctctcc

SEQ ID NO: 17288 - DNA, 20 bp, Homo sapiens
cgcggccccgctccatcccg

SEQ ID NO: 17289 - DNA, 23 bp, Homo sapiens
cctggccccgcctccagttaccc

SEQ ID NO: 17290 - DNA, 18 bp, Homo sapiens
ccgcggccccgcgctccg

SEQ ID NO: 17291 - DNA, 22 bp, Homo sapiens
ccgcgcccccgccccccgctcg

SEQ ID NO: 17292 - DNA, 16 bp, Homo sapiens
ggccccgtccacgccc

SEQ ID NO: 17293 - DNA, 24 bp, Homo sapiens
tgcgtcgcgcgcgcgccgttctgg

SEQ ID NO: 17294 - DNA, 18 bp, Homo sapiens
gcgcgcgtgcgctcaagg

SEQ ID NO: 17295 - DNA, 20 bp, Homo sapiens
gcgcgcgtgcgtgcggcggg

SEQ ID NO: 17296 - DNA, 24 bp, Homo sapiens
tgcgcgcgcgtgcgtgccgtgtgg

SEQ ID NO: 17297 - DNA, 18 bp, Homo sapiens
tgcgcgcgcgcccgcccg

SEQ ID NO: 17298 - DNA, 22 bp, Homo sapiens
gcgcgcggcgcccagccggggg

SEQ ID NO: 17299 - DNA, 18 bp, Homo sapiens
tgcgcgcgcgggtgcccg

SEQ ID NO: 17300 - DNA, 28 bp, Homo sapiens
tgtgcgcgcgcgtgtgtagcccccgcgg

SEQ ID NO: 17301 - DNA, 19 bp, Homo sapiens
tgcgcgcgcgcgcccccgg

SEQ ID NO: 17302 - DNA, 25 bp, Homo sapiens
tgcgcgcgcgcgcgtgtgcccccgg

SEQ ID NO: 17303 - DNA, 18 bp, Homo sapiens
tgtgcgcgcgcgcgcgcc

SEQ ID NO: 17304 - DNA, 25 bp, Homo sapiens
tgcgcgcgcgcgcgtgcccccgcgg

SEQ ID NO: 17305 - DNA, 23 bp, Homo sapiens
tgcgcgcgcgcgcgtgaaggggg

SEQ ID NO: 17306 - DNA, 21 bp, Homo sapiens
tgtgcgcgcgcgtgcccccgg

SEQ ID NO: 17307 - DNA, 25 bp, Homo sapiens
tgtgcgcgcgcgtgtgtgcccccgg

SEQ ID NO: 17308 - DNA, 23 bp, Homo sapiens
tgtgcgcgcgcgtgtgcccccgg

SEQ ID NO: 17309 - DNA, 16 bp, Homo sapiens
gcgcgcggcgtgcggg

SEQ ID NO: 17310 - DNA, 20 bp, Homo sapiens
tgcgcgcgtgtgcccctggg

SEQ ID NO: 17311 - DNA, 23 bp, Homo sapiens
tgcgcgcgcgccgagaagagggg

SEQ ID NO: 17312 - DNA, 20 bp, Homo sapiens
gcgcgcgcgcgcggcggggg

SEQ ID NO: 17313 - DNA, 21 bp, Homo sapiens
tggcgcgcgcgcgccgcgcgg

SEQ ID NO: 17314 - DNA, 19 bp, Homo sapiens
gcgcgcgcgcgcgccgcgg

SEQ ID NO: 17315 - DNA, 60 bp, Variola virus
gcccctcgccccctcccgcccctcgccccctcccgcccctcgccccctcccgcccctcgc

SEQ ID NO: 17316 - DNA, 23 bp, Variola virus
cctcgccccctcccgcccctcgc

SEQ ID NO: 17317 - DNA, 24 bp, Variola virus
tcgccccctcccgcccctcgcccc

SEQ ID NO: 17318 - DNA, 16 bp, Homo sapiens
tctccccctcccaacg

SEQ ID NO: 17319 - DNA, 20 bp, Homo sapiens
cctcgtgcctgccttctcgc

SEQ ID NO: 17320 - DNA, 18 bp, Homo sapiens
cctcgcgctcgcccctcg

SEQ ID NO: 17321 - DNA, 17 bp, Homo sapiens
tctcctcctccagctcg

SEQ ID NO: 17322 - DNA, 17 bp, Homo sapiens
cccgccgccgcctctcg

SEQ ID NO: 17323 - DNA, 24 bp, Homo sapiens
ctcccccctccccccacccctcgc

SEQ ID NO: 17324 - DNA, 25 bp, Homo sapiens
ctcgcaccagaggccccgctcttcg

SEQ ID NO: 17325 - DNA, 18 bp, Homo sapiens
cctcgacccctcctgggc

SEQ ID NO: 17326 - DNA, 23 bp, Homo sapiens
cctcgcgctcttctgcccctcgc

SEQ ID NO: 17327 - DNA, 20 bp, Homo sapiens
ctgcgccccccggcccctcg

SEQ ID NO: 17328 - DNA, 23 bp, Homo sapiens
cctgcgggcctcccgctccttgc

SEQ ID NO: 17329 - DNA, 23 bp, Homo sapiens
cctgcccccccgctgcttctcgc

SEQ ID NO: 17330 - DNA, 17 bp, Homo sapiens
cctgcccttccacccct

SEQ ID NO: 17331 - DNA, 18 bp, Homo sapiens
cctccgcctcctcctgcc

SEQ ID NO: 17332 - DNA, 21 bp, Homo sapiens
ctcgccgctccctgcccctcg

SEQ ID NO: 17333 - DNA, 16 bp, Homo sapiens
ctggccccctctctcg

SEQ ID NO: 17334 - DNA, 20 bp, Homo sapiens
ctcgcccctttcctccccct

SEQ ID NO: 17335 - DNA, 23 bp, Homo sapiens
cctctccggctcccgcctctcgc

SEQ ID NO: 17336 - DNA, 23 bp, Homo sapiens
cctgccccctcctctagattcgc

SEQ ID NO: 17337 - DNA, 17 bp, Homo sapiens
cgcgctccggcccctcg

SEQ ID NO: 17338 - DNA, 18 bp, Homo sapiens
cctgcctcgaacccctcg

SEQ ID NO: 17339 - DNA, 20 bp, Homo sapiens
ccttcgcctcccactctcgc

SEQ ID NO: 17340 - DNA, 20 bp, Homo sapiens
cctcgccctcactgcctcgc

SEQ ID NO: 17341 - DNA, 16 bp, Homo sapiens
cctgcctcctcccccc

SEQ ID NO: 17342 - DNA, 18 bp, Homo sapiens
ccttaccccctccccacg

SEQ ID NO: 17343 - DNA, 24 bp, Homo sapiens
cctcgcccccgccggccgcttcgc

SEQ ID NO: 17344 - DNA, 21 bp, Homo sapiens
ccgccctgccctgcccctcgc

SEQ ID NO: 17345 - DNA, 20 bp, Homo sapiens
ccttgcgctcgcctccttgc

SEQ ID NO: 17346 - DNA, 18 bp, Homo sapiens
cctccgccctctcccagc

SEQ ID NO: 17347 - DNA, 23 bp, Homo sapiens
ccatgcccccaagcccccctcgc

SEQ ID NO: 17348 - DNA, 18 bp, Homo sapiens
cccgcctcctttccccgc

SEQ ID NO: 17349 - DNA, 18 bp, Homo sapiens
ccttccccctccttctcg

SEQ ID NO: 17350 - DNA, 20 bp, Homo sapiens
ccttgtcctccccgcccctc

SEQ ID NO: 17351 - DNA, 27 bp, Homo sapiens
ctctgtcccctccccgggccccctcgc

SEQ ID NO: 17352 - DNA, 18 bp, Homo sapiens
cctcctcccctcccgccc

SEQ ID NO: 17353 - DNA, 18 bp, Homo sapiens
cctctccccctccccctg

SEQ ID NO: 17354 - DNA, 21 bp, Homo sapiens
cctctccctcttctgacctgc

SEQ ID NO: 17355 - DNA, 18 bp, Homo sapiens
ccccgccccccccttcgc

SEQ ID NO: 17356 - DNA, 21 bp, Homo sapiens
cctgtccttccctgcccctcg

SEQ ID NO: 17357 - DNA, 17 bp, Homo sapiens
ccttccctctcctctcg

SEQ ID NO: 17358 - DNA, 22 bp, Homo sapiens
ccccgcccgcctccgtccttcg

SEQ ID NO: 17359 - DNA, 23 bp, Homo sapiens
cctcctccgcccccgcccttcgc

SEQ ID NO: 17360 - DNA, 17 bp, Homo sapiens
ctcgccccgctccctcg

SEQ ID NO: 17361 - DNA, 25 bp, Homo sapiens
cctcgccatctgccccgcccctcgc

SEQ ID NO: 17362 - DNA, 21 bp, Homo sapiens
cctcacccttgagccctttgc

SEQ ID NO: 17363 - DNA, 17 bp, Homo sapiens
cccgccccctctgctcg

SEQ ID NO: 17364 - DNA, 18 bp, Homo sapiens
tcgccctcggcccctcgc

SEQ ID NO: 17365 - DNA, 23 bp, Homo sapiens
ccgcgcccccccgagcccctcgc

SEQ ID NO: 17366 - DNA, 24 bp, Homo sapiens
ctcaccccttcctggtctccttgc

SEQ ID NO: 17367 - DNA, 22 bp, Homo sapiens
ccttcgcccacttgcccctcgc

SEQ ID NO: 17368 - DNA, 20 bp, Homo sapiens
ctgcgctcccctcccctcgc

SEQ ID NO: 17369 - DNA, 18 bp, Homo sapiens
cctcgccctctccttccc

SEQ ID NO: 17370 - DNA, 21 bp, Homo sapiens
gcacccctcccatttccctcg

SEQ ID NO: 17371 - DNA, 17 bp, Homo sapiens
ctcccccctccagttcg

SEQ ID NO: 17372 - DNA, 16 bp, Homo sapiens
ctcgctctctccctcg

SEQ ID NO: 17373 - DNA, 18 bp, Homo sapiens
cctcccctctccgctcct

SEQ ID NO: 17374 - DNA, 17 bp, Homo sapiens
cctttccccctcccctc

SEQ ID NO: 17375 - DNA, 20 bp, Homo sapiens
tcaccccctctcgacattcg

SEQ ID NO: 17376 - DNA, 19 bp, Homo sapiens
cctccttccctcccgagcc

SEQ ID NO: 17377 - DNA, 18 bp, Homo sapiens
cctccactagcccctcgc

SEQ ID NO: 17378 - DNA, 18 bp, Homo sapiens
cctcgccctcccccatcg

SEQ ID NO: 17379 - DNA, 21 bp, Homo sapiens
ccgccccctcctgcctgactc

SEQ ID NO: 17380 - DNA, 18 bp, Homo sapiens
ccgtcctctcctgccccc

SEQ ID NO: 17381 - DNA, 21 bp, Homo sapiens
gcccctccctgcttgcaactc

SEQ ID NO: 17382 - DNA, 20 bp, Homo sapiens
ccgcctcctcccgccgctgc

SEQ ID NO: 17383 - DNA, 20 bp, Homo sapiens
tcggtccagccgcccctcgc

SEQ ID NO: 17384 - DNA, 21 bp, Homo sapiens
cctctctcccgccgccgccgc

SEQ ID NO: 17385 - DNA, 20 bp, Homo sapiens
ccgcctcctctccccgcctc

SEQ ID NO: 17386 - DNA, 28 bp, Homo sapiens
tcgcaccagaggccccgctcttcgttcc

SEQ ID NO: 17387 - DNA, 29 bp, Homo sapiens
gccccttcccgcccgcacaccttgccccg

SEQ ID NO: 17388 - DNA, 20 bp, Homo sapiens
ccgcctccatctcctcgccc

SEQ ID NO: 17389 - DNA, 20 bp, Homo sapiens
gcccctgtgcccctcgctcc

SEQ ID NO: 17390 - DNA, 18 bp, Homo sapiens
ccgccccttccctgcccc

SEQ ID NO: 17391 - DNA, 20 bp, Homo sapiens
tctcccctcccgcccgactc

SEQ ID NO: 17392 - DNA, 22 bp, Homo sapiens
tcctccccttccggaagagccc

SEQ ID NO: 17393 - DNA, 19 bp, Homo sapiens
gcccttccaccccttgtcc

SEQ ID NO: 17394 - DNA, 16 bp, Homo sapiens
tcgcctcctcctcctc

SEQ ID NO: 17395 - DNA, 20 bp, Homo sapiens
ccgcctctgtcccttgctcc

SEQ ID NO: 17396 - DNA, 19 bp, Homo sapiens
ccgcctcctcctgcctgcc

SEQ ID NO: 17397 - DNA, 17 bp, Homo sapiens
tcgtcccccccgcctcg

SEQ ID NO: 17398 - DNA, 20 bp, Homo sapiens
ccgccccgccccctcgtccc

SEQ ID NO: 17399 - DNA, 18 bp, Homo sapiens
cgcgccccgcccctcgcc

SEQ ID NO: 17400 - DNA, 18 bp, Homo sapiens
tcccccctcctgctgctc

SEQ ID NO: 17401 - DNA, 17 bp, Homo sapiens
ccctccctcccatgccc

SEQ ID NO: 17402 - DNA, 15 bp, Homo sapiens
cccctcccgtctgcc

SEQ ID NO: 17403 - DNA, 21 bp, Homo sapiens
cgccccctccctcccctcgcc

SEQ ID NO: 17404 - DNA, 18 bp, Homo sapiens
tcgcccccgcccgcactc

SEQ ID NO: 17405 - DNA, 23 bp, Homo sapiens
tctccggctcccgcctctcgccc

SEQ ID NO: 17406 - DNA, 19 bp, Homo sapiens
ccgccccggcccctcgtcc

SEQ ID NO: 17407 - DNA, 20 bp, Homo sapiens
ccgcccccttcctgcgcctc

SEQ ID NO: 17408 - DNA, 19 bp, Homo sapiens
ccctcctcccgcctggctc

SEQ ID NO: 17409 - DNA, 18 bp, Homo sapiens
tcgcccacccctttgccc

SEQ ID NO: 17410 - DNA, 21 bp, Homo sapiens
cctcccacgagttctttgccc

SEQ ID NO: 17411 - DNA, 24 bp, Homo sapiens
cgcttcttcctcctccctcgcccc

SEQ ID NO: 17412 - DNA, 18 bp, Homo sapiens
tcgcctcctcccaccccc

SEQ ID NO: 17413 - DNA, 20 bp, Homo sapiens
tcgccccctcttcccctccc

SEQ ID NO: 17414 - DNA, 18 bp, Homo sapiens
accccctccccacgctcc

SEQ ID NO: 17415 - DNA, 17 bp, Homo sapiens
tcgcccctcctgctgcc

SEQ ID NO: 17416 - DNA, 18 bp, Homo sapiens
ccgccccctcccgccccc

SEQ ID NO: 17417 - DNA, 19 bp, Homo sapiens
tcgccttctccgctgctgc

SEQ ID NO: 17418 - DNA, 23 bp, Homo sapiens
tcgcccccgccggccgcttcgcc

SEQ ID NO: 17419 - DNA, 19 bp, Homo sapiens
tcgctcgcttgctcgctcc

SEQ ID NO: 17420 - DNA, 24 bp, Homo sapiens
cgtcctctcccgcccgccggctcc

SEQ ID NO: 17421 - DNA, 18 bp, Homo sapiens
ccgccttctccccgcccc

SEQ ID NO: 17422 - DNA, 16 bp, Homo sapiens
gctccctcgctcgccc

SEQ ID NO: 17423 - DNA, 20 bp, Homo sapiens
tcgtcctcgcccgccgcctc

SEQ ID NO: 17424 - DNA, 19 bp, Homo sapiens
tcctcccctcccaccgccc

SEQ ID NO: 17425 - DNA, 19 bp, Homo sapiens
ccccctcccgccccacccc

SEQ ID NO: 17426 - DNA, 18 bp, Homo sapiens
tcgccccatcccgggctc

SEQ ID NO: 17427 - DNA, 21 bp, Homo sapiens
ccgcgggcccgccccttgtcc

SEQ ID NO: 17428 - DNA, 17 bp, Homo sapiens
cctccccgcccctcccc

SEQ ID NO: 17429 - DNA, 19 bp, Homo sapiens
tcgctcccacctcttttgc

SEQ ID NO: 17430 - DNA, 18 bp, Homo sapiens
tcccctcctcccgccccc

SEQ ID NO: 17431 - DNA, 21 bp, Homo sapiens
tcgccccccgcgagcttcgcc

SEQ ID NO: 17432 - DNA, 19 bp, Homo sapiens
tctcctcttgacccgcccc

SEQ ID NO: 17433 - DNA, 18 bp, Homo sapiens
ccgccccctcccgcccct

SEQ ID NO: 17434 - DNA, 22 bp, Homo sapiens
tcctcccctcccgcccgcgacc

SEQ ID NO: 17435 - DNA, 20 bp, Homo sapiens
ccttccctcccgcgcgcctc

SEQ ID NO: 17436 - DNA, 15 bp, Homo sapiens
ccctccctctcgccc

SEQ ID NO: 17437 - DNA, 17 bp, Homo sapiens
tcaccccctcccatcgc

SEQ ID NO: 17438 - DNA, 19 bp, Homo sapiens
ccgccccccccttcgcccc

SEQ ID NO: 17439 - DNA, 19 bp, Homo sapiens
cctcccctccccctgtccc

SEQ ID NO: 17440 - DNA, 23 bp, Homo sapiens
tcgcccccttgcgcggcggcccc

SEQ ID NO: 17441 - DNA, 21 bp, Homo sapiens
gctcctcagcaccctcgcccc

SEQ ID NO: 17442 - DNA, 20 bp, Homo sapiens
tcgccccttcctgccagccc

SEQ ID NO: 17443 - DNA, 18 bp, Homo sapiens
tcgctcctcctccgcccc

SEQ ID NO: 17444 - DNA, 22 bp, Homo sapiens
tcacccttgagccctttgcccc

SEQ ID NO: 17445 - DNA, 18 bp, Homo sapiens
tcggcccctccctgctcc

SEQ ID NO: 17446 - DNA, 17 bp, Homo sapiens
ccgccccctctgctcgc

SEQ ID NO: 17447 - DNA, 20 bp, Homo sapiens
tcgccctcggcccctcgccc

SEQ ID NO: 17448 - DNA, 21 bp, Homo sapiens
tcgcctccgcctggccgcctc

SEQ ID NO: 17449 - DNA, 20 bp, Homo sapiens
tcgcccacttgcccctcgcc

SEQ ID NO: 17450 - DNA, 16 bp, Homo sapiens
cgccccctcccgcgcc

SEQ ID NO: 17451 - DNA, 18 bp, Homo sapiens
gccctcctccctcgcctc

SEQ ID NO: 17452 - DNA, 19 bp, Homo sapiens
tcgccctctccttcccggc

SEQ ID NO: 17453 - DNA, 19 bp, Homo sapiens
gctttcttcctctcacccc

SEQ ID NO: 17454 - DNA, 23 bp, Homo sapiens
ccctcaccagtaccttttgtccc

SEQ ID NO: 17455 - DNA, 23 bp, Homo sapiens
tcaccccctcaaagttttgcccc

SEQ ID NO: 17456 - DNA, 20 bp, Homo sapiens
ccgccccttcctgccgcctc

SEQ ID NO: 17457 - DNA, 25 bp, Homo sapiens
ccgcccctttctgctggaggacccc

SEQ ID NO: 17458 - DNA, 19 bp, Homo sapiens
gcaccttttcccccgcccc

SEQ ID NO: 17459 - DNA, 22 bp, Homo sapiens
cccctctccgctcctttgttcc

SEQ ID NO: 17460 - DNA, 19 bp, Homo sapiens
cgctccccgcccctcgccc

SEQ ID NO: 17461 - DNA, 20 bp, Homo sapiens
tcgccctcgcccgccgcctc

SEQ ID NO: 17462 - DNA, 21 bp, Homo sapiens
ccgcttcttgcccctcgtccc

SEQ ID NO: 17463 - DNA, 22 bp, Homo sapiens
cgttcctctcaagcccctcgcc

SEQ ID NO: 17464 - DNA, 17 bp, Homo sapiens
cgcctcctcccgccctc

SEQ ID NO: 17465 - DNA, 16 bp, Homo sapiens
ccccgcctccctcgcc

SEQ ID NO: 17466 - DNA, 20 bp, Homo sapiens
cctccactagcccctcgccc

SEQ ID NO: 17467 - DNA, 20 bp, Homo sapiens
gccctttctcgccctcgccc

SEQ ID NO: 17468 - DNA, 64 bp, Paramecium bursaria Chlorella virus 1
gcatatggaacggtactggatgtagaacacttgtgtgtctatatgataacagagcttccaatgc

SEQ ID NO: 17469 - DNA, 24 bp, Paramecium bursaria Chlorella virus 1
tatggaacggtactggatgtagaa

SEQ ID NO: 17470 - DNA, 23 bp, Paramecium bursaria Chlorella virus 1
tatgataacagagcttccaatgc

SEQ ID NO: 17471 - DNA, 20 bp, Homo sapiens
tatggagcgtggatgtagaa

SEQ ID NO: 17472 - DNA, 20 bp, Homo sapiens
atggaatgcaagaggtgtag

SEQ ID NO: 17473 - DNA, 22 bp, Homo sapiens
tgggatggggctagatatggaa

SEQ ID NO: 17474 - DNA, 20 bp, Homo sapiens
tatgggagctgaagatgtag

SEQ ID NO: 17475 - DNA, 21 bp, Homo sapiens
tggggtgccaaggatgtagaa

SEQ ID NO: 17476 - DNA, 18 bp, Homo sapiens
gataacagagacaaatgc

SEQ ID NO: 17477 - DNA, 20 bp, Homo sapiens
atgacagccaaaactaatgc

SEQ ID NO: 17478 - DNA, 16 bp, Homo sapiens
tgatagcagagctctg

SEQ ID NO: 17479 - DNA, 19 bp, Homo sapiens
catgacaaaaattccaatg

SEQ ID NO: 17480 - DNA, 26 bp, Homo sapiens
tacgataaatgctcagtttccagtgc

SEQ ID NO: 17481 - DNA, 21 bp, Homo sapiens
tatgatgacctttttccaatg

SEQ ID NO: 17482 - DNA, 20 bp, Homo sapiens
tgatatgtattttccaatgc

SEQ ID NO: 17483 - DNA, 95 bp, Paramecium bursaria Chlorella virus 1
ttcggcatttacttctaatataaggacgttaaatactccaaatgcatttatttggaatacgagcgtaccgagtagcggacttttagatgcgagaa

SEQ ID NO: 17484 - DNA, 24 bp, Paramecium bursaria Chlorella virus 1
tctaatataaggacgttaaatact

SEQ ID NO: 17485 - DNA, 24 bp, Paramecium bursaria Chlorella virus 1
tggaatacgagcgtaccgagtagc

SEQ ID NO: 17486 - DNA, 26 bp, Homo sapiens
tgaaatacgagctgcttcttgggtag

SEQ ID NO: 17487 - DNA, 117 bp, Melanoplus sanguinipes entomopoxvirus
tagaaatatatttttgttcaggtatatcaacaaatgtatatgatggaaaatatatatttaaaaaaatatttataccatcatataatatagttaaatgctttttattaatattttcta

SEQ ID NO: 17488 - DNA, 24 bp, Melanoplus sanguinipes entomopoxvirus
ttcaggtatatcaacaaatgtata

SEQ ID NO: 17489 - DNA, 24 bp, Melanoplus sanguinipes entomopoxvirus
tttataccatcatataatatagtt

SEQ ID NO: 17490 - DNA, 18 bp, Homo sapiens
ttcaagtatattaatgta

SEQ ID NO: 17491 - DNA, 19 bp, Homo sapiens
agttaccaacaaatgtata

SEQ ID NO: 17492 - DNA, 18 bp, Homo sapiens
tttatatcaccatataat

SEQ ID NO: 17493 - DNA, 61 bp, Melanoplus sanguinipes entomopoxvirus
gttgggaagtgcatgttaatgaggacactatctttgctcctgttactagctcttcgccggc

SEQ ID NO: 17494 - DNA, 24 bp, Melanoplus sanguinipes entomopoxvirus
ctcctgttactagctcttcgccgg

SEQ ID NO: 17495 - DNA, 24 bp, Melanoplus sanguinipes entomopoxvirus
gtgcatgttaatgaggacactatc

SEQ ID NO: 17496 - DNA, 18 bp, Homo sapiens
tcctttttctcttcgccg

SEQ ID NO: 17497 - DNA, 19 bp, Homo sapiens
tcctgttactgttccccag

SEQ ID NO: 17498 - DNA, 112 bp, Melanoplus sanguinipes entomopoxvirus
catatggtattttatcggtatataaatctaataaactatgtgtattttttacagcatttgccataggaaaatcatatataattatttcttccattgttaaaatatctatatg

SEQ ID NO: 17499 - DNA, 24 bp, Melanoplus sanguinipes entomopoxvirus
tattttatcggtatataaatctaa

SEQ ID NO: 17500 - DNA, 24 bp, Melanoplus sanguinipes entomopoxvirus
taggaaaatcatatataattattt

SEQ ID NO: 17501 - DNA, 27 bp, Homo sapiens
tattttacattgcagtatataaatcta

SEQ ID NO: 17502 - DNA, 17 bp, Homo sapiens
ggaaaatcatgtcaatt

SEQ ID NO: 17503 - DNA, 18 bp, Homo sapiens
taggaaaatcttgtatat

SEQ ID NO: 17504 - DNA, 62 bp, Melanoplus sanguinipes entomopoxvirus
tataaaatcgtaatactagtatatcataatgagattttaattctggtgttaatatttttata

SEQ ID NO: 17505 - DNA, 23 bp, Melanoplus sanguinipes entomopoxvirus
attctggtgttaatatttttata

SEQ ID NO: 17506 - DNA, 24 bp, Melanoplus sanguinipes entomopoxvirus
cgtaatactagtatatcataatga

SEQ ID NO: 17507 - DNA, 25 bp, Homo sapiens
attctgattttaaaaatatttttat

SEQ ID NO: 17508 - DNA, 18 bp, Homo sapiens
ttctggggctatttttat

SEQ ID NO: 17509 - DNA, 21 bp, Homo sapiens
attctgataaaatatttttat

SEQ ID NO: 17510 - DNA, 18 bp, Homo sapiens
ctctggtgttcttttata

SEQ ID NO: 17511 - DNA, 22 bp, Homo sapiens
taatatctctatatcatagtga

SEQ ID NO: 17512 - DNA, 63 bp, Human papillomavirus type 61
gccgcgcctgactagagtacacactataaattccattccggtgacttactactaggcgctggc

SEQ ID NO: 17513 - DNA, 17 bp, Human papillomavirus type 61
tactactaggcgctggc

SEQ ID NO: 17514 - DNA, 24 bp, Human papillomavirus type 61
cgcctgactagagtacacactata

SEQ ID NO: 17515 - DNA, 19 bp, Homo sapiens
ctactaggaatatgctggc

SEQ ID NO: 17516 - DNA, 18 bp, Homo sapiens
cactactagagacaaggc

SEQ ID NO: 17517 - DNA, 24 bp, Homo sapiens
gcctgactggagcacttcattata

SEQ ID NO: 17518 - DNA, 21 bp, Homo sapiens
ctacaccaagtatacactata

SEQ ID NO: 17519 - DNA, 16 bp, Homo sapiens
cgctgactaagcacac

SEQ ID NO: 17520 - DNA, 65 bp, Chimpanzee cytomegalovirus
cagtcttttgtccaatagtgtcgaataagcgttctatttctagtagtgctattggaaaaagactg

SEQ ID NO: 17521 - DNA, 24 bp, Chimpanzee cytomegalovirus
tcttttgtccaatagtgtcgaata

SEQ ID NO: 17522 - DNA, 22 bp, Chimpanzee cytomegalovirus
tagtgctattggaaaaagactg

SEQ ID NO: 17523 - DNA, 23 bp, Homo sapiens
tctttgtccaatatctacgaata

SEQ ID NO: 17524 - DNA, 22 bp, Homo sapiens
tcttttatctagttctctgaat

SEQ ID NO: 17525 - DNA, 17 bp, Homo sapiens
cttttgtccagtgttaa

SEQ ID NO: 17526 - DNA, 18 bp, Homo sapiens
tgccattgggggaggctg

SEQ ID NO: 17527 - DNA, 21 bp, Homo sapiens
taatactaagggaaaaggctg

SEQ ID NO: 17528 - DNA, 23 bp, Homo sapiens
gtgctattattcccaaaaggctg

SEQ ID NO: 17529 - DNA, 21 bp, Homo sapiens
tagtatatcaaaagaagactg

SEQ ID NO: 17530 - DNA, 20 bp, Homo sapiens
tagtttttcagaaaagactg

SEQ ID NO: 17531 - DNA, 21 bp, Homo sapiens
agtgctattgggaaaatactg

SEQ ID NO: 17532 - DNA, 17 bp, Homo sapiens
gctgtagaaaaagactg

SEQ ID NO: 17533 - DNA, 20 bp, Homo sapiens
tagtgctatttgacatcaga

SEQ ID NO: 17534 - DNA, 96 bp, Fowl adenovirus A
aattcaccacgcccgggagatttcgaaattgctatttccgtgcagttccgcattccgaagtacaatttaaccggttttatgggtgttcggtgtttt

SEQ ID NO: 17535 - DNA, 22 bp, Fowl adenovirus A
ttttatgggtgttcggtgtttt

SEQ ID NO: 17536 - DNA, 24 bp, Fowl adenovirus A
ttcaccacgcccgggagatttcga

SEQ ID NO: 17537 - DNA, 19 bp, Homo sapiens
atagtgtgtttggtgtttt

SEQ ID NO: 17538 - DNA, 21 bp, Homo sapiens
ttttaaggctcaaggtgtttt

SEQ ID NO: 17539 - DNA, 20 bp, Homo sapiens
ttttagcaggttggtgtttt

SEQ ID NO: 17540 - DNA, 16 bp, Homo sapiens
ccgcgcccggggctcg

SEQ ID NO: 17541 - DNA, 82 bp, Fowl adenovirus A
gcggttttcggtctctcctcactcggcagatgacttcggaagagaagctgcagagttcgtctccggagaccggcctcgccgc

SEQ ID NO: 17542 - DNA, 24 bp, Fowl adenovirus A
aagctgcagagttcgtctccggag

SEQ ID NO: 17543 - DNA, 24 bp, Fowl adenovirus A
cactcggcagatgacttcggaaga

SEQ ID NO: 17544 - DNA, 18 bp, Homo sapiens
aaactgcagggtctgggg

SEQ ID NO: 17545 - DNA, 21 bp, Homo sapiens
gctcggcgcgcgtctccggag

SEQ ID NO: 17546 - DNA, 15 bp, Homo sapiens
gctcagggtccccgg

SEQ ID NO: 17547 - DNA, 16 bp, Homo sapiens
gctggcaggcctccgg

SEQ ID NO: 17548 - DNA, 22 bp, Homo sapiens
agctgcaggatcgggtccggag

SEQ ID NO: 17549 - DNA, 22 bp, Homo sapiens
aagctgggggtccaggctggag

SEQ ID NO: 17550 - DNA, 19 bp, Homo sapiens
agctgcagagtccgcagag

SEQ ID NO: 17551 - DNA, 21 bp, Homo sapiens
agctgcagagtccagctgggg

SEQ ID NO: 17552 - DNA, 21 bp, Homo sapiens
gctgcagaggggtgtctgggg

SEQ ID NO: 17553 - DNA, 17 bp, Homo sapiens
acttgcagaactctgga

SEQ ID NO: 17554 - DNA, 20 bp, Homo sapiens
gcctgtgggtggctccggag

SEQ ID NO: 17555 - DNA, 22 bp, Homo sapiens
gccgcagagagccactctggag

SEQ ID NO: 17556 - DNA, 21 bp, Homo sapiens
aggtgcagagtcagtctgggg

SEQ ID NO: 17557 - DNA, 19 bp, Homo sapiens
aagctgcagacgtttgcgg

SEQ ID NO: 17558 - DNA, 29 bp, Homo sapiens
cactcgacgggaaaacggggggtcttccg

SEQ ID NO: 17559 - DNA, 30 bp, Homo sapiens
cacgtggcagatggggctaaggtcttccga

SEQ ID NO: 17560 - DNA, 23 bp, Homo sapiens
cacttgacagatgagtgcacgga

SEQ ID NO: 17561 - DNA, 18 bp, Homo sapiens
cacacggcagatgggcgg

SEQ ID NO: 17562 - DNA, 16 bp, Homo sapiens
tcggcagcttcggaag

SEQ ID NO: 17563 - DNA, 21 bp, Homo sapiens
ctcggcaggtgacagctaaga

SEQ ID NO: 17564 - DNA, 16 bp, Homo sapiens
ctcggcaacacggaag

SEQ ID NO: 17565 - DNA, 67 bp, Fowl adenovirus A
gcgctggtccccatccgcccgattaacccctgcatttacgcccctgtaaggagcggatcgccagtgc

SEQ ID NO: 17566 - DNA, 24 bp, Fowl adenovirus A
tccccatccgcccgattaacccct

SEQ ID NO: 17567 - DNA, 23 bp, Fowl adenovirus A
tgtaaggagcggatcgccagtgc

SEQ ID NO: 17568 - DNA, 22 bp, Homo sapiens
ccatccgccctgcagcgcccct

SEQ ID NO: 17569 - DNA, 16 bp, Homo sapiens
cccccatccattaacc

SEQ ID NO: 17570 - DNA, 22 bp, Homo sapiens
tccccatctctactcaaattcc

SEQ ID NO: 17571 - DNA, 19 bp, Homo sapiens
tcctcacccgcccccgcct

SEQ ID NO: 17572 - DNA, 22 bp, Homo sapiens
cccatctgatgtgttaacccct

SEQ ID NO: 17573 - DNA, 22 bp, Homo sapiens
tctccatccacagaaggcctct

SEQ ID NO: 17574 - DNA, 18 bp, Homo sapiens
tccccatctggccaaatt

SEQ ID NO: 17575 - DNA, 18 bp, Homo sapiens
tcctcctccgcccgctcc

SEQ ID NO: 17576 - DNA, 18 bp, Homo sapiens
tccccatccctgagtccc

SEQ ID NO: 17577 - DNA, 22 bp, Homo sapiens
tccccatctccccagtttccct

SEQ ID NO: 17578 - DNA, 23 bp, Homo sapiens
tccccattctttgcttccagatt

SEQ ID NO: 17579 - DNA, 19 bp, Homo sapiens
tccccatcagcctagcccc

SEQ ID NO: 17580 - DNA, 26 bp, Homo sapiens
tccccatccccccagcccaggcccct

SEQ ID NO: 17581 - DNA, 25 bp, Homo sapiens
tccccatctcccctggacggtccct

SEQ ID NO: 17582 - DNA, 19 bp, Homo sapiens
tccccatcgctatagcccc

SEQ ID NO: 17583 - DNA, 18 bp, Homo sapiens
tctccatccgcttcccct

SEQ ID NO: 17584 - DNA, 20 bp, Homo sapiens
cccatccgtactcagcctct

SEQ ID NO: 17585 - DNA, 22 bp, Homo sapiens
tccccatctgcagcaggcctct

SEQ ID NO: 17586 - DNA, 18 bp, Homo sapiens
ccaccacgcccggttaac

SEQ ID NO: 17587 - DNA, 19 bp, Homo sapiens
tccccattcctccaacccc

SEQ ID NO: 17588 - DNA, 24 bp, Homo sapiens
tccccatctctcctgtctgtccct

SEQ ID NO: 17589 - DNA, 21 bp, Homo sapiens
tctcctgtctgtccctcccct

SEQ ID NO: 17590 - DNA, 21 bp, Homo sapiens
cccagcctaatgttaacccct

SEQ ID NO: 17591 - DNA, 22 bp, Homo sapiens
tctccgcccgcccgcctcccct

SEQ ID NO: 17592 - DNA, 62 bp, Fowlpox virus
tcttaaagcggccatcgttcagtacttgctggcatggtgacatgagtgatgatgctttatga

SEQ ID NO: 17593 - DNA, 24 bp, Fowlpox virus
tggcatggtgacatgagtgatgat

SEQ ID NO: 17594 - DNA, 24 bp, Fowlpox virus
aagcggccatcgttcagtacttgc

SEQ ID NO: 17595 - DNA, 20 bp, Homo sapiens
tggtgtggtgagatgataac

SEQ ID NO: 17596 - DNA, 23 bp, Homo sapiens
tggcatggtggtaggcacctgtg

SEQ ID NO: 17597 - DNA, 21 bp, Homo sapiens
tggcatggtggcatgcacctg

SEQ ID NO: 17598 - DNA, 17 bp, Homo sapiens
tggcaggtggcatgagt

SEQ ID NO: 17599 - DNA, 20 bp, Homo sapiens
ggcatggtggcatgagcctg

SEQ ID NO: 17600 - DNA, 19 bp, Homo sapiens
tggcatgggactggctctg

SEQ ID NO: 17601 - DNA, 21 bp, Homo sapiens
gcatggtgataataaaatgat

SEQ ID NO: 17602 - DNA, 20 bp, Homo sapiens
tggcataggtggcatgggca

SEQ ID NO: 17603 - DNA, 16 bp, Homo sapiens
gcggccatagtgcttg

SEQ ID NO: 17604 - DNA, 21 bp, Homo sapiens
gcagctggggaacagtacttg

SEQ ID NO: 17605 - DNA, 76 bp, Fowlpox virus
gcgtgtaatacgctggtgtctcattatatactagcgttgcagcgctaggactacctaagacaaccgtattatacgt

SEQ ID NO: 17606 - DNA, 24 bp, Fowlpox virus
tggtgtctcattatatactagcgt

SEQ ID NO: 17607 - DNA, 24 bp, Fowlpox virus
taggactacctaagacaaccgtat

SEQ ID NO: 17608 - DNA, 20 bp, Homo sapiens
tagtgttttgttatatacca

What is claimed is:

1. A bioinformatically detectable novel viral gene encoding substantially pure nucleic acid wherein:
a) RNA encoded by said bioinformatically detectable novel viral gene is about 18 to about 24 nucleotides in length, and originates from an RNA precursor, which RNA precursor is about 50 to about 120 nucleotides in length;
b) a nucleotide sequence of a first half of said RNA precursor is a partial inversed-reversed sequence of a nucleotide sequence of a second half thereof;
c) a nucleotide sequence of said RNA encoded by said novel viral gene is a partial inversed-reversed sequence of a nucleotide sequence of a binding site associated with at least one host target gene; and
d) a function of said novel viral gene is bioinformatically deducible.

2. A bioinformatically detectable novel viral gene encoding substantially pure DNA wherein:
a) RNA encoded by said bioninformatically detectable novel viral gene comprises a plurality of RNA sections, each of said RNA sections being about 50 to about 120 nucleotides in length, and comprising an RNA segment, which RNA segment is about 18 to about 24 nucleotides in length;
b) a nucleotide sequence of a first half of each of said RNA sections encoded by said novel gene is a partial inversed-reversed sequence of nucleotide sequence of a second half thereof;
c) a nucleotide sequence of each of said RNA segments encoded by said novel gene is a partial inversed-reversed sequence of the nucleotide sequence of a binding site associated with at least one target gene; and
d) a function of said novel gene is bioinformatically deducible from the following data elements: said nucleotide sequence of said RNA encoded by said novel gene, a nucleotide sequence of said at least one target gene, and function of said at least one target gene.

3. A bioinformatically detectable novel viral gene encoding substantially pure DNA wherein:
a) RNA encoded by said bioinformatically detectable novel gene is about 18 to about 24 nucleotides in length, and originates from an RNA precursor, which RNA precursor is about 50 to about 120 nucleotides in length;
b) a nucleotide sequence of a first half of said RNA precursor is a partial inversed-reversed sequence of a nucleotide sequence of a second half thereof;
c) a nucleotide sequence of said RNA encoded by said novel gene is a partial inversed-reversed sequence of a nucleotide sequence of a binding site associated with at least one target gene;
d) a function of said novel gene is modulation of expression of said at least one target gene; and
e) said at least one target gene does not encode a protein.

6. A bioinformatically detectable novel gene according to claim 1 and wherein said function of said novel gene is bioinformatically deducible from the following data elements:
a) said nucleotide sequence of said RNA encoded by said bioinformatically detectable novel gene,
b) a nucleotide sequence of said at least one target gene; and
c) a function of said at least one target gene.

7. A bioinformatically detectable novel gene according to claim 1 and wherein said RNA encoded by said novel gene complementarily binds said binding site associated with said at least one target gene, thereby modulating expression of said at least one target gene.

8. A bioinformatically detectable novel gene according to claim 1 and wherein:
said binding site associated with at least one target gene is located in an untranslated region of RNA encoded by said at least one target gene.

9. A bioinformatically detectable novel gene according to claim 7 and wherein:
said function of said novel gene is selective inhibition of translation of said at least one target gene, which selective inhibition comprises complementary hybridization of said RNA encoded by said novel gene to said binding site.

10. A vector comprising the DNA of claim 1.

11. A method of selectively inhibiting translation of at least one gene, comprising introducing the vector of claim 10 into a cell.

12. A method according to claim 11 and wherein said introducing comprises utilizing RNAi pathway.

13. A gene expression inhibition system comprising:
a) the vector of claim 10; and
b) a vector inserter, functional to insert said vector of claim 10 into a cell, thereby selectively inhibiting translation of at least one gene.

14. A probe comprising the DNA of claim 1.

15. A method of selectively detecting expression of at least one gene, comprising using the probe of claim 14.

16. A gene expression detection system comprising:
a) the probe of claim 14; and
b) a gene expression detector functional to selectively detect expression of at least one gene.

17. An anti-viral substance capable of neutralizing said RNA of claim 1.

18. A substance according to claim 17 and wherein said neutralizing comprises complementarily binding said RNA.

19. A substance according to claim 17 and wherein said neutralizing comprises immunologically neutralizing.

20. A method for anti-viral treatment comprising neutralizing said RNA of claim

21. A method according to claim 20 and wherein said neutralizing comprises:
a) synthesizing a complementary nucleic acid molecule, a nucleic sequence of which complementary nucleic acid molecule is a partial inversed-reversed sequence of said RNA; and
b) transfecting host cells with said complementary nucleic acid molecule, thereby complementarily binding said RNA.

22. A method according to claim 20 and wherein said neutralizing comprises immunologically neutralizing.
